(19) United States
(12) Patent Application Publication
(10) Pub. No.: US 2022/0056480 A1
(43) Pub. Date: Feb. 24, 2022

(54) MODIFIED ORTHOPOXVIRUS VECTORS

(71) Applicants: OTTAWA HOSPITAL RESEARCH INSTITUTE, Ottawa (CA); TURNSTONE BIOLOGICS CORP., New York, NY (US)

(72) Inventors: John C. BELL, Ottawa (CA); Michael S. HUH, Ottawa (CA); Matthew Y. TANG, Orleans (CA); Adrian PELIN, San Francisco, CA (US); Caroline J. BREITBACH, Somerville, MA (US); Michael F. BURGESS, Chester, NJ (US); Steven H. BERNSTEIN, Lawrenceville, NJ (US)

(73) Assignees: OTTAWA HOSPITAL RESEARCH INSTITUTE, Ottawa, ON (CA); TURNSTONE BIOLOGICS CORP., New York, NY (US)

(21) Appl. No.: 17/415,575

(22) PCT Filed: Dec. 20, 2019
(86) PCT No.: PCT/CA2019/051898

§ 371 Date: Jun. 17, 2021

Related U.S. Application Data
(60) Provisional application No. 62/784,372, filed on Dec. 21, 2018.
(60) Provisional application No. 62/872,699, filed on Jul. 10, 2019.
(60) Provisional application No. 62/930,524, filed on Nov. 4, 2019.

(51) Int. Cl. C12N 15/86; C07K 16/28; C07K 14/54

(52) U.S. Cl. CPC C12N 15/86; C07K 16/2818; C07K 14/5434; C12N 2710/24143; C12N 2710/24122; C12N 2710/24132; C12N 2710/24121

(57) ABSTRACT

The disclosure relates to modified orthopoxvirus vectors, as well as methods of using the same for the treatment of various cancers. The disclosure provides modified orthopoxvirus vectors that exhibit various beneficial therapeutic activities, including enhanced oncolytic activity, spread of infection, immune evasion, tumor persistence, capacity for incorporation of exogenous DNA sequences, amenability for large scale manufacturing, and safety.

### CROSS-REFERENCE TO RELATED APPLICATIONS

[0001] This application claims the benefit of priority to U.S. Provisional Patent Application No. 62/930,524, filed Nov. 4, 2019, U.S. Provisional Patent Application No. 62/872,699, filed Jul. 10, 2019, and U.S. Provisional Patent Application No. 62/784,372, filed Dec. 21, 2018, the disclosure of each of which is incorporated by reference herein in its entirety.

### SEQUENCE LISTING

[0002] This application incorporates by reference a Sequence Listing submitted with this application as an ASCII text file, entitled 14596-050-228_SL.txt, created on Dec. 18, 2019, and having a size of 1,252,729 bytes.

### 1. Field

[0003] The invention relates to the field of immunotherapy, e.g., for the treatment of cell proliferation disorders, such as cancers. Particularly, the invention relates to genetically modified orthopoxviruses, as well as methods of making and using the same.

### 2. Background

[0004] The immune system may be stimulated to identify tumor cells and target them for destruction. Immunotherapy employing oncolytic orthopoxviruses is a rapidly evolving area in cancer research. New approaches are needed to engineer and/or enhance tumor-selectivity for oncolytic viruses in order to maximize efficiency and safety. This selectivity is especially important when potentially toxic therapeutic agents or genes are added to the viruses.

[0005] Although the use of orthopoxviruses as clinical oncolytic vectors is a promising paradigm for cancer treatment, due to toxicity, such as pox lesions in patients, and immunosuppressive side effects, most current clinical candidates have shown only modest clinical success. There exists a need for methods to engineer orthopoxviruses that exhibit more robust virus replication, cancer cell killing, and spreading from the point of infection. The present invention addresses this need and provides a solution to selectivity and safety limitations by employing a modified orthopoxvirus.

### 3. SUMMARY

[0006] The present disclosure describes the use of orthopoxviruses for the treatment of cancer. In particular, the disclosure is based in part on the enhanced oncolytic activity, spread of infection, and safety results engendered when an orthopoxvirus is genetically modified to contain deletions in one or more, or all, of the following genes: the C2L, C1L, N1L, N2L, M1L, M2L, K1L, K2L, K3L, K4L, K5L, K6L, K7R, F1L, F2L, F3L, B14R, B15R, B16R, B17L, B18R, B19R, and B20R genes. Genetically modified orthopoxviruses, such as vaccinia viruses (e.g., Copenhagen, Western Reserve, Wyeth, Lister, EM63, ACAM2000, LC16m8, CV-1, modified vaccinia Ankara (MVA), Dairen I, GLV-1h68, IHD-J, L-IVP, LC16mO, Tashkent, Tian Tan, and WAU86/88-1 viruses) that exhibit mutations in one or more, or all, of these genes may exhibit an array of beneficial features, such as improved oncolytic ability, replication in tumors, infectivity, immune evasion, tumor persistence, capacity for incorporation of exogenous DNA sequences, and/or amenability for large scale manufacturing. The present disclosure describes orthopox viruses further genetically modified to contain deletions in the B8R gene. In various embodiments, the modified orthopoxvirus expresses at least one of three transgenes: Interleukin 12 containing a transmembrane domain (IL-12-TM), FMS-like tyrosine kinase 3 ligand (FLT3-L) and anti-Cytotoxic T-lymphocyte Associated Protein 4 (CTLA-4) antibody.

[0007] In one aspect, provided herein is a nucleic acid comprising a recombinant vaccinia virus genome, comprising: (a) deletions in the following genes: C2L, C1L, N1L, N2L, M1L, M2L, K1L, K2L, K3L, K4L, K5L, K6L, K7R, F1L, F2L, F3L, B8R, B14R, B15R, B16R, B17L, B18R, B19R, and B20R; (b) deletions in the following genes in the 3′ inverted terminal repeat (ITR): B21R, B22R, B23R, B24R, B25R, B26R, B27R, B28R, and B29R; and (c) a first transgene comprising a first nucleotide sequence encoding an antibody or antigen-binding fragment thereof that specifically binds to Cytotoxic T-lymphocyte Associated Protein 4 (CTLA-4); wherein the deletions in the C2L, F3L, B14R, and B29R vaccinia genes are partial deletions.

[0008] In certain embodiments, the nucleic acid further comprises a nucleotide sequence comprising at least one promoter operably linked to the first nucleotide sequence. In a specific embodiment, the at least one promoter operably linked to the first nucleotide sequence is an H5R promoter, a pS promoter, or a LEO promoter. In another specific embodiment, the at least one promoter operably linked to the first nucleotide sequence is an H5R promoter.

[0009] In some embodiments, the first nucleotide sequence is in the same orientation as the endogenous vaccinia virus genes that flank the first nucleotide sequence.

[0010] In specific embodiments, the first nucleotide sequence encodes an amino acid sequence comprising the amino acid sequence set forth in SEQ ID NO: 211. In specific embodiments, the first nucleotide sequence comprises the sequence set forth in SEQ ID NO: 214. In specific embodiments, the first nucleotide sequence is set forth in SEQ ID NO: 214.

[0011] In another aspect, provided herein is a nucleic acid comprising a recombinant vaccinia virus genome, comprising: (a) deletions in the following genes: C2L, C1L, N1L, N2L, M1L, M2L, K1L, K2L, K3L, K4L, K5L, K6L, K7R, F1L, F2L, F3L, B14R, B15R, B16R, B17L, B18R, B19R, and B20R, and optionally a deletion in the B8R gene; (b) deletions in the following genes in the 3′ ITR: B21R, B22R, B23R, B24R, B25R, B26R, B27R, B28R, and B29R; (c) a first transgene comprising a first nucleotide sequence encoding an antibody or antigen-binding fragment thereof that specifically binds to CTLA-4; and (d) a nucleotide sequence comprising at least one promoter operably linked to the first nucleotide sequence, wherein the at least one promoter operably linked to the first nucleotide sequence is an H5R promoter, a pS promoter, or a LEO promoter; wherein the deletions in the C2L, F3L, B14R, and B29R vaccinia genes are partial deletions. In a particular embodiment, the nucleic acid comprises a recombinant vaccinia virus genome that comprises a deletion in the B8R gene.

[0012] In certain embodiments, the at least one promoter operably linked to the first nucleotide sequence is an H5R promoter.

[0013] In some embodiments, the first nucleotide sequence is in the same orientation as the endogenous vaccinia virus genes that flank the first nucleotide sequence.

[0014] In specific embodiments, the first nucleotide sequence encodes an amino acid sequence comprising the amino acid sequence set forth in SEQ ID NO: 211. In specific embodiments, the first nucleotide sequence comprises the sequence set forth in SEQ ID NO: 214. In specific embodiments, the first nucleotide sequence is set forth in SEQ ID NO: 214.

[0015] In another aspect, provided herein is a nucleic acid comprising a recombinant vaccinia virus genome, comprising: (a) deletions in the following genes: C2L, C1L, N1L, N2L, M1L, M2L, K1L, K2L, K3L, K4L, K5L, K6L, K7R, F1L, F2L, F3L, B8R, B14R, B15R, B16R, B17L, B18R, B19R, and B20R; (b) deletions in the following genes in the 3′ ITR: B21R, B22R, B23R, B24R, B25R, B26R, B27R, B28R, and B29R; and (c) a second transgene comprising a second nucleotide sequence encoding an Interleukin 12 (IL-12) polypeptide; wherein the deletions in the C2L, F3L, B14R, and B29R vaccinia genes are partial deletions.

[0016] In certain embodiments, the nucleic acid further comprises a nucleotide sequence comprising at least one promoter operably linked to the second nucleotide sequence. In a specific embodiment, the at least one promoter operably linked to the second nucleotide sequence is a late promoter. In a further specific embodiment, the late promoter comprises the nucleotide sequence of SEQ ID NO: 561, an F17R promoter, or a D13L promoter. In another further specific embodiment, the late promoter comprises the nucleotide sequence of SEQ ID NO: 561. In another embodiment, the F17R promoter comprises the nucleotide sequence of SEQ ID NO:563. In yet another embodiment, the D13L promoter comprises the nucleotide sequence of SEQ ID NO:562.

[0017] In some embodiments, the second nucleotide sequence is in the same orientation as the endogenous vaccinia virus genes that flank the second nucleotide sequence.

[0018] In specific embodiments, the IL-12 polypeptide is membrane-bound. In specific embodiments, the IL-12 polypeptide comprises IL-12 p35 or IL-12 p70. In specific embodiments, the IL-12 polypeptide comprises the amino acid sequence set forth in SEQ ID NO: 212. In specific embodiments, the second nucleotide sequence comprises the sequence set forth in SEQ ID NO: 215. In specific embodiments, the second nucleotide sequence is set forth in SEQ ID NO: 215.

[0019] In another aspect, provided herein is a nucleic acid comprising a recombinant vaccinia virus genome, comprising: (a) deletions in the following genes: C2L, C1L, N1L, N2L, M1L, M2L, K1L, K2L, K3L, K4L, K5L, K6L, K7R, F1L, F2L, F3L, B14R, B15R, B16R, B17L, B18R, B19R, and B20R, and optionally a deletion in the B8R gene; (b) deletions in the following genes in the 3′ ITR: B21R, B22R, B23R, B24R, B25R, B26R, B27R, B28R, and B29R; (c) a second transgene comprising a second nucleotide sequence encoding an IL-12 polypeptide; and (d) a nucleotide sequence comprising at least one promoter operably linked to the second nucleotide sequence, wherein the at least one promoter operably linked to the second nucleotide sequence is a late promoter; wherein the deletions in the C2L, F3L, B14R, and B29R vaccinia genes are partial deletions. In a particular embodiment, the nucleic acid comprises a recombinant vaccinia virus genome that comprises a deletion in the B8R gene.

[0020] In certain embodiments, the late promoter comprises the nucleotide sequence of SEQ ID NO: 561, an F17R promoter, or a D13L promoter. In a specific embodiment, the late promoter comprises the nucleotide sequence of SEQ ID NO: 561. In another embodiment, the F17R promoter comprises the nucleotide sequence of SEQ ID NO:563. In yet another embodiment, the D13L promoter comprises the nucleotide sequence of SEQ ID NO:562.

[0021] In some embodiments, the second nucleotide sequence is in the same orientation as the endogenous vaccinia virus genes that flank the second nucleotide sequence.

[0022] In specific embodiments, the IL-12 polypeptide is membrane-bound. In specific embodiments, the IL-12 polypeptide comprises IL-12 p35 or IL-12 p70. In specific embodiments, the IL-12 polypeptide comprises the amino acid sequence set forth in SEQ ID NO: 212. In specific embodiments, the second nucleotide sequence comprises the sequence set forth in SEQ ID NO: 215. In specific embodiments, the second nucleotide sequence is set forth in SEQ ID NO: 215.

[0023] In another aspect, provided herein is a nucleic acid comprising a recombinant vaccinia virus genome, comprising: (a) deletions in the following genes: C2L, C1L, N1L, N2L, M1L, M2L, K1L, K2L, K3L, K4L, K5L, K6L, K7R, F1L, F2L, F3L, B8R, B14R, B15R, B16R, B17L, B18R, B19R, and B20R; (b) deletions in the following genes in the 3′ ITR: B21R, B22R, B23R, B24R, B25R, B26R, B27R, B28R, and B29R; and (c) a third transgene comprising a third nucleotide sequence encoding FMS-like tyrosine kinase 3 ligand (FLT3L); wherein the deletions in the C2L, F3L, B14R, and B29R vaccinia genes are partial deletions.

[0024] In certain embodiments, the nucleic acid further comprises a nucleotide sequence comprising at least one promoter operably linked to the third nucleotide sequence. In a specific embodiment, the at least one promoter operably linked to the third nucleotide sequence is a B8R promoter, a B19R promoter, a E3L promoter, an F11L promoter, or a B2R promoter. In another specific embodiment, the at least one promoter operably linked to the third nucleotide sequence is a B8R promoter. In another specific embodiment, the at least one promoter operably linked to the third nucleotide sequence is a B19R promoter. In another specific embodiment, the at least one promoter operably linked to the third nucleotide sequence is a B8R promoter and a B19R promoter. In a particular embodiment, the B8R promoter comprises the nucleotide sequence of SEQ ID NO: 564. In a particular embodiment, the B19R promoter comprises the nucleotide sequence of SEQ ID NO: 565. In a particular embodiment, the E3L promoter comprises the nucleotide sequence of SEQ ID NO: 567. In a particular embodiment, the F11L promoter comprises the nucleotide sequence of SEQ ID NO: 568. In a particular embodiment, the B2R promoter comprises the nucleotide sequence of SEQ ID NO: 569.

[0025] In some embodiments, the third nucleotide sequence is in the same orientation as the endogenous vaccinia virus genes that flank the third nucleotide sequence. In specific embodiments, the FLT3L comprises the amino acid sequence set forth in SEQ ID NO: 213. In specific embodiments, the third nucleotide sequence comprises the sequence set forth in SEQ ID NO: 216. In specific embodiments, the third nucleotide sequence is set forth in SEQ ID NO: 216.

[0026] In another aspect, provided herein is a nucleic acid comprising a recombinant vaccinia virus genome, comprising: (a) deletions in the following genes: C2L, C1L, N1L, N2L, M1L, M2L, K1L, K2L, K3L, K4L, K5L, K6L, K7R, F1L, F2L, F3L, B14R, B15R, B16R, B17L, B18R, B19R, and B20R, and optionally a deletion in the B8R gene; (b) deletions in the following genes in the 3′ ITR: B21R, B22R, B23R, B24R, B25R, B26R, B27R, B28R, and B29R; (c) a third transgene comprising a third nucleotide sequence encoding FLT3L; and (d) a nucleotide sequence comprising at least one promoter operably linked to the third nucleotide sequence, wherein the at least one promoter operably linked to the third nucleotide sequence is a B8R promoter, a B19R promoter, a E3L promoter, an F11L promoter, or a B2R promoter; wherein the deletions in the C2L, F3L, B14R, and B29R vaccinia genes are partial deletions. In a particular embodiment, the nucleic acid comprises a recombinant vaccinia virus genome that comprises a deletion in the B8R gene. In a particular embodiment, the B8R promoter comprises the nucleotide sequence of SEQ ID NO: 564. In a particular embodiment, the B19R promoter comprises the nucleotide sequence of SEQ ID NO: 565. In a particular embodiment, the E3L promoter comprises the nucleotide sequence of SEQ ID NO: 567. In a particular embodiment, the F11L promoter comprises the nucleotide sequence of SEQ ID NO: 568. In a particular embodiment, the B2R promoter comprises the nucleotide sequence of SEQ ID NO: 569.

[0027] In certain embodiments, the at least one promoter operably linked to the third nucleotide sequence is a B8R promoter. In certain embodiments, the at least one promoter operably linked to the third nucleotide sequence is a B19R promoter. In certain embodiments, the at least one promoter operably linked to the third nucleotide sequence is a B8R promoter and a B19R promoter. In a particular embodiment, the B8R promoter comprises the nucleotide sequence of SEQ ID NO: 564. In a particular embodiment, the B19R promoter comprises the nucleotide sequence of SEQ ID NO: 565.

[0028] In some embodiments, the third nucleotide sequence is in the same orientation as the endogenous vaccinia virus genes that flank the third nucleotide sequence. In specific embodiments, the FLT3L comprises the amino acid sequence set forth in SEQ ID NO: 213. In specific embodiments, the third nucleotide sequence comprises the sequence set forth in SEQ ID NO: 216. In specific embodiments, the third nucleotide sequence is set forth in SEQ ID NO: 216.

[0029] In another aspect, provided herein is a nucleic acid comprising a recombinant vaccinia virus genome, comprising: (a) deletions in the following genes: C2L, C1L, N1L, N2L, M1L, M2L, K1L, K2L, K3L, K4L, K5L, K6L, K7R, F1L, F2L, F3L, B8R, B14R, B15R, B16R, B17L, B18R, B19R, and B20R; (b) deletions in the following genes in the 3′ ITR: B21R, B22R, B23R, B24R, B25R, B26R, B27R, B28R, and B29R; (c) a first transgene comprising a first nucleotide sequence encoding an antibody or antigen-binding fragment thereof that specifically binds to CTLA-4; and (d) a second transgene comprising a second nucleotide sequence encoding an IL-12 polypeptide; wherein the deletions in the C2L, F3L, B14R, and B29R vaccinia genes are partial deletions.

[0030] In certain embodiments, the nucleic acid further comprises a nucleotide sequence comprising at least one promoter operably linked to the first nucleotide sequence. In a specific embodiment, the at least one promoter operably linked to the first nucleotide sequence is an H5R promoter, a pS promoter, or a LEO promoter. In another specific embodiment, the at least one promoter operably linked to the first nucleotide sequence is an H5R promoter.

[0031] In certain embodiments, the nucleic acid further comprises a nucleotide sequence comprising at least one promoter operably linked to the second nucleotide sequence. In a specific embodiment, the at least one promoter operably linked to the second nucleotide sequence is a late promoter. In a further specific embodiment, the late promoter comprises the nucleotide sequence of SEQ ID NO: 561, an F17R promoter, or a D13L promoter. In another further specific embodiment, the late promoter comprises the nucleotide sequence of SEQ ID NO: 561. In another embodiment, the F17R promoter comprises the nucleotide sequence of SEQ ID NO:563. In yet another embodiment, the D13L promoter comprises the nucleotide sequence of SEQ ID NO:562.

[0032] In some embodiments, the first nucleotide sequence is in the same orientation as endogenous vaccinia virus genes that flank the first nucleotide sequence, and the second nucleotide sequence is in the same orientation as endogenous vaccinia virus genes that flank the second nucleotide sequence.

[0033] In specific embodiments, the first nucleotide sequence encodes an amino acid sequence comprising the amino acid sequence set forth in SEQ ID NO: 211. In specific embodiments, the first nucleotide sequence comprises the sequence set forth in SEQ ID NO: 214. In specific embodiments, the first nucleotide sequence is set forth in SEQ ID NO: 214.

[0034] In specific embodiments, the IL-12 polypeptide is membrane-bound. In specific embodiments, the IL-12 polypeptide comprises IL-12 p35 or IL-12 p70. In specific embodiments, the IL-12 polypeptide comprises the amino acid sequence set forth in SEQ ID NO: 212. In specific embodiments, the second nucleotide sequence comprises the sequence set forth in SEQ ID NO: 215. In specific embodiments, the second nucleotide sequence is set forth in SEQ ID NO: 215.

[0035] In another aspect, provided herein is a nucleic acid comprising a recombinant vaccinia virus genome, comprising: (a) deletions in the following genes: C2L, C1L, N1L, N2L, M1L, M2L, K1L, K2L, K3L, K4L, K5L, K6L, K7R, F1L, F2L, F3L, B14R, B15R, B16R, B17L, B18R, B19R, and B20R, and optionally a deletion in the B8R gene; (b) deletions in the following genes in the 3′ ITR: B21R, B22R, B23R, B24R, B25R, B26R, B27R, B28R, and B29R; (c) a first transgene comprising a first nucleotide sequence encoding an antibody or antigen-binding fragment thereof that specifically binds to CTLA-4; and (d) a second transgene comprising a second nucleotide sequence encoding an IL-12 polypeptide; wherein the deletions in the C2L, F3L, B14R, and B29R vaccinia genes are partial deletions; and wherein the nucleic acid further comprises: (i) a nucleotide sequence comprising at least one promoter operably linked to the first nucleotide sequence, wherein the at least one promoter operably linked to the first nucleotide sequence is an H5R promoter, a pS promoter, or a LEO promoter; and/or (ii) a nucleotide sequence comprising at least one promoter operably linked to the second nucleotide sequence, wherein the at least one promoter operably linked to the second nucleotide sequence is a late promoter. In a particular embodiment, the nucleic acid comprises a recombinant vaccinia virus genome that comprises a deletion in the B8R gene.

[0036] In certain embodiments, the at least one promoter operably linked to the first nucleotide sequence is an H5R promoter.

[0037] In certain embodiments, the late promoter comprises the nucleotide sequence of SEQ ID NO: 561, an F17R promoter, or a D13L promoter. In a specific embodiment, the late promoter comprises the nucleotide sequence of SEQ ID NO: 561. In another embodiment, the F17R promoter comprises the nucleotide sequence of SEQ ID NO:563. In yet another embodiment, the D13L promoter comprises the nucleotide sequence of SEQ ID NO:562.

[0038] In some embodiments, the first nucleotide sequence is in the same orientation as endogenous vaccinia virus genes that flank the first nucleotide sequence, and the second nucleotide sequence is in the same orientation as endogenous vaccinia virus genes that flank the second nucleotide sequence.

[0039] In specific embodiments, the first nucleotide sequence encodes an amino acid sequence comprising the amino acid sequence set forth in SEQ ID NO: 211. In specific embodiments, the first nucleotide sequence comprises the sequence set forth in SEQ ID NO: 214. In specific embodiments, the first nucleotide sequence is set forth in SEQ ID NO: 214.

[0040] In specific embodiments, the IL-12 polypeptide is membrane-bound. In specific embodiments, the IL-12 polypeptide comprises IL-12 p35 or IL-12 p70. In specific embodiments, the IL-12 polypeptide comprises the amino acid sequence set forth in SEQ ID NO: 212. In specific embodiments, the second nucleotide sequence comprises the sequence set forth in SEQ ID NO: 215. In specific embodiments, the second nucleotide sequence is set forth in SEQ ID NO: 215.

[0041] In another aspect, provided herein is a nucleic acid comprising a recombinant vaccinia virus genome, comprising: (a) deletions in the following genes: C2L, C1L, N1L, N2L, M1L, M2L, K1L, K2L, K3L, K4L, K5L, K6L, K7R, F1L, F2L, F3L, B8R, B14R, B15R, B16R, B17L, B18R, B19R, and B20R; (b) deletions in the following genes in the 3′ ITR: B21R, B22R, B23R, B24R, B25R, B26R, B27R, B28R, and B29R; (c) a first transgene comprising a first nucleotide sequence encoding an antibody or antigen-binding fragment thereof that specifically binds to CTLA-4; and (d) a third transgene comprising a third nucleotide sequence encoding FLT3L; wherein the deletions in the C2L, F3L, B14R, and B29R vaccinia genes are partial deletions.

[0042] In certain embodiments, the nucleic acid further comprises a nucleotide sequence comprising at least one promoter operably linked to the first nucleotide sequence. In a specific embodiment, the at least one promoter operably linked to the first nucleotide sequence is an H5R promoter, a pS promoter, or a LEO promoter. In another specific embodiment, the at least one promoter operably linked to the first nucleotide sequence is an H5R promoter.

[0043] In certain embodiments, the nucleic acid further comprises a nucleotide sequence comprising at least one promoter operably linked to the third nucleotide sequence. In a specific embodiment, the at least one promoter operably linked to the third nucleotide sequence is a B8R promoter, a B19R promoter, a E3L promoter, an F11L promoter, or a B2R promoter. In another specific embodiment, the at least one promoter operably linked to the third nucleotide sequence is a B8R promoter. In another specific embodiment, the at least one promoter operably linked to the third nucleotide sequence is a B19R promoter. In another specific embodiment, the at least one promoter operably linked to the third nucleotide sequence is a B8R promoter and a B19R promoter. In a particular embodiment, the B8R promoter comprises the nucleotide sequence of SEQ ID NO: 564. In a particular embodiment, the B19R promoter comprises the nucleotide sequence of SEQ ID NO: 565.

[0044] In some embodiments, the first nucleotide sequence is in the same orientation as endogenous vaccinia virus genes that flank the first nucleotide sequence, and the third nucleotide sequence is in the same orientation as endogenous vaccinia virus genes that flank the third nucleotide sequence.

[0045] In specific embodiments, the first nucleotide sequence encodes an amino acid sequence comprising the amino acid sequence set forth in SEQ ID NO: 211. In specific embodiments, the first nucleotide sequence comprises the sequence set forth in SEQ ID NO: 214. In specific embodiments, the first nucleotide sequence is set forth in SEQ ID NO: 214.

[0046] In specific embodiments, the FLT3L comprises the amino acid sequence set forth in SEQ ID NO: 213. In specific embodiments, the third nucleotide sequence comprises the sequence set forth in SEQ ID NO: 216. In specific embodiments, the third nucleotide sequence is set forth in SEQ ID NO: 216.

[0047] In another aspect, provided herein is a nucleic acid comprising a recombinant vaccinia virus genome, comprising: (a) deletions in the following genes: C2L, C1L, N1L, N2L, M1L, M2L, K1L, K2L, K3L, K4L, K5L, K6L, K7R, F1L, F2L, F3L, B14R, B15R, B16R, B17L, B18R, B19R, and B20R, and optionally a deletion in the B8R gene; (b) deletions in the following genes in the 3′ ITR: B21R, B22R, B23R, B24R, B25R, B26R, B27R, B28R, and B29R; (c) a first transgene comprising a first nucleotide sequence encoding an antibody or antigen-binding fragment thereof that specifically binds to CTLA-4; and (d) a third transgene comprising a third nucleotide sequence encoding FLT3L; wherein the deletions in the C2L, F3L, B14R, and B29R vaccinia genes are partial deletions; and wherein the nucleic acid further comprises: (i) a nucleotide sequence comprising at least one promoter operably linked to the first nucleotide sequence, wherein the at least one promoter operably linked to the first nucleotide sequence is an H5R promoter, a pS promoter, or a LEO promoter; and/or (ii) a nucleotide sequence comprising at least one promoter operably linked to the third nucleotide sequence, wherein the at least one promoter operably linked to the third nucleotide sequence is a B8R promoter, a B19R promoter, a E3L promoter, an F11L promoter, or a B2R promoter. In a particular embodiment, the nucleic acid comprises a recombinant vaccinia virus genome that comprises a deletion in the B8R gene. In a particular embodiment, the B8R promoter comprises the nucleotide sequence of SEQ ID NO: 564. In a particular embodiment, the B19R promoter comprises the nucleotide sequence of SEQ ID NO: 565. In a particular embodiment, the E3L promoter comprises the nucleotide sequence of SEQ ID NO: 567. In a particular embodiment, the F11L promoter comprises the nucleotide sequence of SEQ ID NO: 568. In a particular embodiment, the B2R promoter comprises the nucleotide sequence of SEQ ID NO: 569.

[0048] In certain embodiments, the at least one promoter operably linked to the first nucleotide sequence is an H5R promoter.

[0049] In certain embodiments, the at least one promoter operably linked to the third nucleotide sequence is a B8R promoter. In certain embodiments, the at least one promoter operably linked to the third nucleotide sequence is a B19R promoter. In certain embodiments, the at least one promoter operably linked to the third nucleotide sequence is a B8R promoter and a B19R promoter. In a particular embodiment, the B8R promoter comprises the nucleotide sequence of SEQ ID NO: 564. In a particular embodiment, the B19R promoter comprises the nucleotide sequence of SEQ ID NO: 565.

[0050] In some embodiments, the first nucleotide sequence is in the same orientation as endogenous vaccinia virus genes that flank the first nucleotide sequence, and the third nucleotide sequence is in the same orientation as endogenous vaccinia virus genes that flank the third nucleotide sequence.

[0051] In specific embodiments, the first nucleotide sequence encodes an amino acid sequence comprising the amino acid sequence set forth in SEQ ID NO: 211. In specific embodiments, the first nucleotide sequence comprises the sequence set forth in SEQ ID NO: 214. In specific embodiments, the first nucleotide sequence is set forth in SEQ ID NO: 214.

[0052] In specific embodiments, the FLT3L comprises the amino acid sequence set forth in SEQ ID NO: 213. In specific embodiments, the third nucleotide sequence comprises the sequence set forth in SEQ ID NO: 216. In specific embodiments, the third nucleotide sequence is set forth in SEQ ID NO: 216.

[0053] In another aspect, provided herein is a nucleic acid comprising a recombinant vaccinia virus genome, comprising: (a) deletions in the following genes: C2L, C1L, N1L, N2L, M1L, M2L, K1L, K2L, K3L, K4L, K5L, K6L, K7R, F1L, F2L, F3L, B8R, B14R, B15R, B16R, B17L, B18R, B19R, and B20R; (b) deletions in the following genes in the 3′ ITR: B21R, B22R, B23R, B24R, B25R, B26R, B27R, B28R, and B29R; (c) a second transgene comprising a second nucleotide sequence encoding an IL-12 polypeptide; and (d) a third transgene comprising a third nucleotide sequence encoding FLT3L; wherein the deletions in the C2L, F3L, B14R, and B29R vaccinia genes are partial deletions.

[0054] In certain embodiments, the nucleic acid further comprises a nucleotide sequence comprising at least one promoter operably linked to the second nucleotide sequence. In a specific embodiment, the at least one promoter operably linked to the second nucleotide sequence is a late promoter. In a further specific embodiment, the late promoter comprises the nucleotide sequence of SEQ ID NO: 561, an F17R promoter, or a D13L promoter. In another further specific embodiment, the late promoter comprises the nucleotide sequence of SEQ ID NO: 561. In another embodiment, the F17R promoter comprises the nucleotide sequence of SEQ ID NO:563. In yet another embodiment, the D13L promoter comprises the nucleotide sequence of SEQ ID NO:562.

[0055] In certain embodiments, the nucleic acid further comprises a nucleotide sequence comprising at least one promoter operably linked to the third nucleotide sequence. In a specific embodiment, the at least one promoter operably linked to the third nucleotide sequence is a B8R promoter, a B19R promoter, a E3L promoter, an F11L promoter, or a B2R promoter. In another specific embodiment, the at least one promoter operably linked to the third nucleotide sequence is a B8R promoter. In another specific embodiment, the at least one promoter operably linked to the third nucleotide sequence is a B19R promoter. In another specific embodiment, the at least one promoter operably linked to the third nucleotide sequence is a B8R promoter and a B19R promoter. In a particular embodiment, the B8R promoter comprises the nucleotide sequence of SEQ ID NO: 564. In a particular embodiment, the B19R promoter comprises the nucleotide sequence of SEQ ID NO: 565. In a particular embodiment, the E3L promoter comprises the nucleotide sequence of SEQ ID NO: 567. In a particular embodiment, the F11L promoter comprises the nucleotide sequence of SEQ ID NO: 568. In a particular embodiment, the B2R promoter comprises the nucleotide sequence of SEQ ID NO: 569.

[0056] In some embodiments, the second nucleotide sequence is in the same orientation as endogenous vaccinia virus genes that flank the second nucleotide sequence, and the third nucleotide sequence is in the same orientation as endogenous vaccinia virus genes that flank the third nucleotide sequence.

[0057] In specific embodiments, the IL-12 polypeptide is membrane-bound. In specific embodiments, the IL-12 polypeptide comprises IL-12 p35 or IL-12 p70. In specific embodiments, the IL-12 polypeptide comprises the amino acid sequence set forth in SEQ ID NO: 212. In specific embodiments, the second nucleotide sequence comprises the sequence set forth in SEQ ID NO: 215. In specific embodiments, the second nucleotide sequence is set forth in SEQ ID NO: 215.

[0058] In specific embodiments, the FLT3L comprises the amino acid sequence set forth in SEQ ID NO: 213. In specific embodiments, the third nucleotide sequence comprises the sequence set forth in SEQ ID NO: 216. In specific embodiments, the third nucleotide sequence is set forth in SEQ ID NO: 216.

[0059] In another aspect, provided here is a nucleic acid comprising a recombinant vaccinia virus genome, comprising: (a) deletions in the following genes: C2L, C1L, N1L, N2L, M1L, M2L, K1L, K2L, K3L, K4L, K5L, K6L, K7R, F1L, F2L, F3L, B14R, B15R, B16R, B17L, B18R, B19R, and B20R, and optionally a deletion in the B8R gene; (b) deletions in the following genes in the 3′ ITR: B21R, B22R, B23R, B24R, B25R, B26R, B27R, B28R, and B29R; (c) a second transgene comprising a second nucleotide sequence encoding an IL-12 polypeptide; and (d) a third transgene comprising a third nucleotide sequence encoding FLT3L; wherein the deletions in the C2L, F3L, B14R, and B29R vaccinia genes are partial deletions; and wherein the nucleic acid further comprises: (i) a nucleotide sequence comprising at least one promoter operably linked to the second nucleotide sequence, wherein the at least one promoter operably linked to the second nucleotide sequence is a late promoter; and/or (ii) a nucleotide sequence comprising at least one promoter operably linked to the third nucleotide sequence, wherein the at least one promoter operably linked to the third nucleotide sequence is a B8R promoter, a B19R promoter, a E3L promoter, an F11L promoter, or a B2R promoter. In a particular embodiment, the nucleic acid comprises a recombinant vaccinia virus genome that comprises a deletion in the B8R gene. In a particular embodiment, the B8R promoter comprises the nucleotide sequence of SEQ ID NO: 564. In a particular embodiment, the B19R promoter comprises the nucleotide sequence of SEQ ID NO: 565. In a particular embodiment, the E3L promoter comprises the nucleotide sequence of SEQ ID NO: 567. In a particular embodiment, the F11L promoter comprises the nucleotide sequence of SEQ ID NO: 568. In a particular embodiment, the B2R promoter comprises the nucleotide sequence of SEQ ID NO: 569.

[0060] In certain embodiments, the late promoter comprises the nucleotide sequence of SEQ ID NO: 561, an F17R promoter, or a D13L promoter. In a specific embodiment, the late promoter comprises the nucleotide sequence of SEQ ID NO: 561. In another embodiment, the F17R promoter comprises the nucleotide sequence of SEQ ID NO:563. In yet another embodiment, the D13L promoter comprises the nucleotide sequence of SEQ ID NO:562.

[0061] In certain embodiments, the at least one promoter operably linked to the third nucleotide sequence is a B8R promoter. In certain embodiments, the at least one promoter operably linked to the third nucleotide sequence is a B19R promoter. In certain embodiments, the at least one promoter operably linked to the third nucleotide sequence is a B8R promoter and a B19R promoter. In a particular embodiment, the B8R promoter comprises the nucleotide sequence of SEQ ID NO: 564. In a particular embodiment, the B19R promoter comprises the nucleotide sequence of SEQ ID NO: 565.

[0062] In some embodiments, the second nucleotide sequence is in the same orientation as endogenous vaccinia virus genes that flank the second nucleotide sequence, and the third nucleotide sequence is in the same orientation as endogenous vaccinia virus genes that flank the third nucleotide sequence.

[0063] In specific embodiments, the IL-12 polypeptide is membrane-bound. In specific embodiments, the IL-12 polypeptide comprises IL-12 p35 or IL-12 p70. In specific embodiments, the IL-12 polypeptide comprises the amino acid sequence set forth in SEQ ID NO: 212. In specific embodiments, the second nucleotide sequence comprises the sequence set forth in SEQ ID NO: 215. In specific embodiments, the second nucleotide sequence is set forth in SEQ ID NO: 215.

[0064] In specific embodiments, the FLT3L comprises the amino acid sequence set forth in SEQ ID NO: 213. In specific embodiments, the third nucleotide sequence comprises the sequence set forth in SEQ ID NO: 216. In specific embodiments, the third nucleotide sequence is set forth in SEQ ID NO: 216.

[0065] In another aspect, provided herein is a nucleic acid comprising a recombinant vaccinia virus genome, comprising: (a) deletions in the following genes: C2L, C1L, N1L, N2L, M1L, M2L, K1L, K2L, K3L, K4L, K5L, K6L, K7R, F1L, F2L, F3L, B8R, B14R, B15R, B16R, B17L, B18R, B19R, and B20R; (b) deletions in the following genes in the 3′ ITR: B21R, B22R, B23R, B24R, B25R, B26R, B27R, B28R, and B29R; (c) a first transgene comprising a first nucleotide sequence encoding an antibody or antigen-binding fragment thereof that specifically binds to CTLA-4; (d) a second transgene comprising a second nucleotide sequence encoding an IL-12 polypeptide; and (e) a third transgene comprising a third nucleotide sequence encoding FLT3L; wherein the deletions in the C2L, F3L, B14R, and B29R vaccinia genes are partial deletions.

[0066] In certain embodiments, the nucleic acid further comprises a nucleotide sequence comprising at least one promoter operably linked to the first nucleotide sequence. In a specific embodiment, the at least one promoter operably linked to the first nucleotide sequence is an H5R promoter, a pS promoter, or a LEO promoter. In another specific embodiment, the at least one promoter operably linked to the first nucleotide sequence is an H5R promoter.

[0067] In certain embodiments, the nucleic acid further comprises a nucleotide sequence comprising at least one promoter operably linked to the second nucleotide sequence. In a specific embodiment, the at least one promoter operably linked to the second nucleotide sequence is a late promoter. In a further specific embodiment, the late promoter comprises the nucleotide sequence of SEQ ID NO: 561, an F17R promoter, or a D13L promoter. In another further specific embodiment, the late promoter comprises the nucleotide sequence of SEQ ID NO: 561. In another embodiment, the F17R promoter comprises the nucleotide sequence of SEQ ID NO:563. In yet another embodiment, the D13L promoter comprises the nucleotide sequence of SEQ ID NO:562.

[0068] In certain embodiments, the nucleic acid further comprises a nucleotide sequence comprising at least one promoter operably linked to the third nucleotide sequence. In a specific embodiment, the at least one promoter operably linked to the third nucleotide sequence is a B8R promoter, a B19R promoter, a E3L promoter, an F11L promoter, or a B2R promoter. In another specific embodiment, the at least one promoter operably linked to the third nucleotide sequence is a B8R promoter. In another specific embodiment, the at least one promoter operably linked to the third nucleotide sequence is a B19R promoter. In another specific embodiment, the at least one promoter operably linked to the third nucleotide sequence is a B8R promoter and a B19R promoter. In a particular embodiment, the B8R promoter comprises the nucleotide sequence of SEQ ID NO: 564. In a particular embodiment, the B19R promoter comprises the nucleotide sequence of SEQ ID NO: 565. In a particular embodiment, the E3L promoter comprises the nucleotide sequence of SEQ ID NO: 567. In a particular embodiment, the F11L promoter comprises the nucleotide sequence of SEQ ID NO: 568. In a particular embodiment, the B2R promoter comprises the nucleotide sequence of SEQ ID NO: 569.

[0069] In some embodiments, the first nucleotide sequence, the first nucleotide sequence is in the same orientation as endogenous vaccinia virus genes that flank the first nucleotide sequence, the second nucleotide sequence is in the same orientation as endogenous vaccinia virus genes that flank the second nucleotide sequence, and the third nucleotide sequence is in the same orientation as endogenous vaccinia virus genes that flank the third nucleotide sequence.

[0070] In specific embodiments, the first nucleotide sequence encodes an amino acid sequence comprising the amino acid sequence set forth in SEQ ID NO: 211. In specific embodiments, the first nucleotide sequence comprises the sequence set forth in SEQ ID NO: 214. In specific embodiments, the first nucleotide sequence is set forth in SEQ ID NO: 214.

[0071] In specific embodiments, the IL-12 polypeptide is membrane-bound. In specific embodiments, the IL-12 polypeptide comprises IL-12 p35 or IL-12 p70. In specific embodiments, the IL-12 polypeptide comprises the amino acid sequence set forth in SEQ ID NO: 212. In specific embodiments, the second nucleotide sequence comprises the sequence set forth in SEQ ID NO: 215. In specific embodiments, the second nucleotide sequence is set forth in SEQ ID NO: 215.

[0072] In specific embodiments, the FLT3L comprises the amino acid sequence set forth in SEQ ID NO: 213. In specific embodiments, the third nucleotide sequence comprises the sequence set forth in SEQ ID NO: 216. In specific embodiments, the third nucleotide sequence is set forth in SEQ ID NO: 216.

[0073] In another aspect, provided herein is a nucleic acid comprising a recombinant vaccinia virus genome, comprising: (a) deletions in the following genes: C2L, C1L, N1L, N2L, M1L, M2L, K1L, K2L, K3L, K4L, K5L, K6L, K7R, F1L, F2L, F3L, B14R, B15R, B16R, B17L, B18R, B19R, and B20R, and optionally a deletion in the B8R gene; (b) deletions in the following genes in the 3′ ITR: B21R, B22R, B23R, B24R, B25R, B26R, B27R, B28R, and B29R; (c) a first transgene comprising a first nucleotide sequence encoding an antibody or antigen-binding fragment thereof that specifically binds to CTLA-4; (d) a second transgene comprising a second nucleotide sequence encoding an IL-12 polypeptide; and (e) a third transgene comprising a third nucleotide sequence encoding FLT3L; wherein the deletions in the C2L, F3L, B14R, and B29R vaccinia genes are partial deletions; and wherein the nucleic acid further comprises: (i) a nucleotide sequence comprising at least one promoter operably linked to the first nucleotide sequence, wherein the at least one promoter operably linked to the first nucleotide sequence is an H5R promoter, a pS promoter, or a LEO promoter; (ii) a nucleotide sequence comprising at least one promoter operably linked to the second nucleotide sequence, wherein the at least one promoter operably linked to the second nucleotide sequence is a late promoter; and/or (iii) a nucleotide sequence comprising at least one promoter operably linked to the third nucleotide sequence, wherein the at least one promoter operably linked to the third nucleotide sequence is a B8R promoter, a B19R promoter, a E3L promoter, an F11L promoter, or a B2R promoter. In a particular embodiment, the nucleic acid comprises a recombinant vaccinia virus genome that comprises a deletion in the B8R gene. In a particular embodiment, the B8R promoter comprises the nucleotide sequence of SEQ ID NO: 564. In a particular embodiment, the B19R promoter comprises the nucleotide sequence of SEQ ID NO: 565. In a particular embodiment, the E3L promoter comprises the nucleotide sequence of SEQ ID NO: 567. In a particular embodiment, the F11L promoter comprises the nucleotide sequence of SEQ ID NO: 568. In a particular embodiment, the B2R promoter comprises the nucleotide sequence of SEQ ID NO: 569.

[0074] In certain embodiments, the at least one promoter operably linked to the first nucleotide sequence is an H5R promoter.

[0075] In certain embodiments, the late promoter comprises the nucleotide sequence of SEQ ID NO: 561, an F17R promoter, or a D13L promoter. In a specific embodiment, the late promoter comprises the nucleotide sequence of SEQ ID NO: 561. In another embodiment, the F17R promoter comprises the nucleotide sequence of SEQ ID NO:563. In yet another embodiment, the D13L promoter comprises the nucleotide sequence of SEQ ID NO:562.

[0076] In certain embodiments, the at least one promoter operably linked to the third nucleotide sequence is a B8R promoter. In certain embodiments, the at least one promoter operably linked to the third nucleotide sequence is a B19R promoter. In certain embodiments, the at least one promoter operably linked to the third nucleotide sequence is a B8R promoter and a B19R promoter. In a particular embodiment, the B8R promoter comprises the nucleotide sequence of SEQ ID NO: 564. In a particular embodiment, the B19R promoter comprises the nucleotide sequence of SEQ ID NO: 565.

[0077] In some embodiments, the first nucleotide sequence is in the same orientation as endogenous vaccinia virus genes that flank the first nucleotide sequence, the second nucleotide sequence is in the same orientation as endogenous vaccinia virus genes that flank the second nucleotide sequence, and the third nucleotide sequence is in the same orientation as endogenous vaccinia virus genes that flank the third nucleotide sequence.

[0078] In specific embodiments, the first nucleotide sequence encodes an amino acid sequence comprising the amino acid sequence set forth in SEQ ID NO: 211. In specific embodiments, the first nucleotide sequence comprises the sequence set forth in SEQ ID NO: 214. In specific embodiments, the first nucleotide sequence is set forth in SEQ ID NO: 214.

[0079] In specific embodiments, the IL-12 polypeptide is membrane-bound. In specific embodiments, the IL-12 polypeptide comprises IL-12 p35 or IL-12 p70. In specific embodiments, the IL-12 polypeptide comprises the amino acid sequence set forth in SEQ ID NO: 212. In specific embodiments, the second nucleotide sequence comprises the sequence set forth in SEQ ID NO: 215. In specific embodiments, the second nucleotide sequence is set forth in SEQ ID NO: 215.

[0080] In specific embodiments, the FLT3L comprises the amino acid sequence set forth in SEQ ID NO: 213. In specific embodiments, the third nucleotide sequence comprises the sequence set forth in SEQ ID NO: 216. In specific embodiments, the third nucleotide sequence is set forth in SEQ ID NO: 216.

[0081] In a specific embodiment, the first transgene is inserted between the partial C2L and F3L vaccinia genes (that is, is present between the partial C2L and F3L genes), and the second transgene and the third transgene are inserted into the locus of the deletion in the B8R gene (that is, are present in the locus of the deletion in the B8R gene). In a specific embodiment, the first transgene is inserted between the portion of the C2L vaccinia gene that remains and the portion of the F3L vaccinia gene that remains (that is, is present between the portion of the C2L vaccinia gene that remains and the portion of the F3L vaccinia gene that remains), and the second transgene and the third transgene are inserted into the locus of the deletion in the B8R gene (that is, are present in the locus of the deletion in the B8R gene). In a further specific embodiment, the third transgene is upstream of the second transgene.

[0082] In some embodiments of the various embodiments and aspects described herein, the deletion in the B8R gene is a deletion of at least 50% of the B8R gene sequence. In other embodiments, the deletion in the B8R gene is a deletion of at least 60% of the B8R gene sequence. In other embodiments, the deletion in the B8R gene is a deletion of at least 70% of the B8R gene sequence. In other embodiments, the deletion in the B8R gene is a deletion of at least 80% of the B8R gene sequence. In a specific embodiment, the deletion in the B8R gene is a deletion of about 75% of the B8R gene sequence. In another specific embodiment, the deletion in the B8R gene is a deletion of about 80% of the B8R gene sequence.

[0083] In certain embodiments of the various embodiments and aspects described herein, the recombinant vaccinia virus genome is derived from the genome of a Copenhagen strain vaccinia virus.

[0084] In certain embodiments of the various embodiments and aspects described herein, the recombinant vaccinia virus genome comprises the nucleotide sequence of SEQ ID NO: 210.

[0085] In another aspect, provided herein is a nucleic acid comprising a recombinant vaccinia virus genome, comprising: (a) deletions in the following genes: C2L, C1L, N1L, N2L, M1L, M2L, K1L, K2L, K3L, K4L, K5L, K6L, K7R, F1L, F2L, F3L, B14R, B15R, B16R, B17L, B18R, B19R, and B20R, and optionally a deletion in the B8R gene; (b) deletions in the following genes in the 3′ ITR: B21R, B22R, B23R, B24R, B25R, B26R, B27R, B28R, and B29R; (c) a first transgene comprising a first nucleotide sequence encoding an antibody or antigen-binding fragment thereof that specifically binds to CTLA-4; (d) a second transgene comprising a second nucleotide sequence encoding an IL-12 polypeptide; and (e) a third transgene comprising a third nucleotide sequence encoding FLT3L; wherein the deletions in the C2L, F3L, B14R, and B29R vaccinia genes are partial deletions; and wherein the nucleic acid further comprises: (i) a nucleotide sequence comprising at least one promoter operably linked to the first nucleotide sequence, wherein the at least one promoter operably linked to the first nucleotide sequence is an H5R promoter; (ii) a nucleotide sequence comprising at least one promoter operably linked to the second nucleotide sequence, wherein the at least one promoter operably linked to the second nucleotide sequence is a late promoter that comprises the nucleotide sequence of SEQ ID NO: 561; and (iii) a nucleotide sequence comprising at least one promoter operably linked to the third nucleotide sequence, wherein the at least one promoter operably linked to the third nucleotide sequence is a B8R promoter and a B19R promoter. In specific embodiments, the first nucleotide sequence is in the same orientation as endogenous vaccinia virus genes that flank the first nucleotide sequence, the second nucleotide sequence is in the same orientation as endogenous vaccinia virus genes that flank the second nucleotide sequence, and the third nucleotide sequence is in the same orientation as endogenous vaccinia virus genes that flank the third nucleotide sequence.

[0086] In specific embodiments, the first transgene is inserted between the partial C2L and F3L vaccinia genes, and the second transgene and the third transgene are inserted into the locus of the deletion in the B8R gene. In specific embodiments, the first transgene is inserted between the partial B14R and B29R vaccinia genes, and the second transgene and the third transgene are inserted into the locus of the deletion in the B8R gene. In specific embodiments, the first transgene is inserted between the portion of the B14R vaccinia gene that remains and the portion of the B29R vaccinia gene that remains, and the second transgene and the third transgene are inserted into the locus of the deletion in the B8R gene. In specific embodiments, the third transgene is upstream of the second transgene. In specific embodiments, the third transgene is downstream of the second transgene. In a particular embodiment, the nucleic acid comprises a recombinant vaccinia virus genome that comprises a deletion in the B8R gene. In a particular embodiment, the B8R promoter comprises the nucleotide sequence of SEQ ID NO: 564.

[0087] In another aspect, provided herein is a nucleic acid comprising a recombinant vaccinia virus genome, comprising: (a) deletions in the following genes: C2L, C1L, N1L, N2L, M1L, M2L, K1L, K2L, K3L, K4L, K5L, K6L, K7R, F1L, F2L, F3L, B14R, B15R, B16R, B17L, B18R, B19R, and B20R, and optionally a deletion in the B8R gene; (b) deletions in the following genes in the 3′ ITR: B21R, B22R, B23R, B24R, B25R, B26R, B27R, B28R, and B29R; (c) a first transgene comprising a first nucleotide sequence encoding an antibody or antigen-binding fragment thereof that specifically binds to CTLA-4, wherein the first nucleotide sequence is in the same orientation as endogenous vaccinia virus genes that flank the first nucleotide sequence, and wherein the first transgene is inserted between the partial C2L and F3L vaccinia genes; (d) a second transgene comprising a second nucleotide sequence encoding an IL-12 polypeptide, wherein the second nucleotide sequence is in the same orientation as endogenous vaccinia virus genes that flank the second nucleotide sequence, and wherein the second transgene is inserted into the locus of the deletion in the B8R gene; and (e) a third transgene comprising a third nucleotide sequence encoding FLT3L, wherein the third nucleotide sequence is in the same orientation as endogenous vaccinia virus genes that flank the third nucleotide sequence, wherein the third transgene is inserted into the locus of the deletion in the B8R gene, and wherein the third transgene is upstream of the second transgene; wherein the deletions in the C2L, F3L, B14R, and B29R vaccinia genes are partial deletions; and wherein the nucleic acid further comprises: (i) a nucleotide sequence comprising at least one promoter operably linked to the first nucleotide sequence, wherein the at least one promoter operably linked to the first nucleotide sequence is an H5R promoter; (ii) a nucleotide sequence comprising at least one promoter operably linked to the second nucleotide sequence, wherein the at least one promoter operably linked to the second nucleotide sequence is a late promoter that comprises the nucleotide sequence of SEQ ID NO: 561; and (iii) a nucleotide sequence comprising at least one promoter operably linked to the third nucleotide sequence, wherein the at least one promoter operably linked to the third nucleotide sequence is a B8R promoter and a B19R promoter. In a particular embodiment, the nucleic acid comprises a recombinant vaccinia virus genome that comprises a deletion in the B8R gene. In a particular embodiment, the B8R promoter comprises the nucleotide sequence of SEQ ID NO: 564. In a particular embodiment, the B19R promoter comprises the nucleotide sequence of SEQ ID NO: 565

[0088] In another aspect, provided herein is a nucleic acid comprising a recombinant vaccinia virus genome, comprising: (a) deletions in the following genes: C2L, C1L, N1L, N2L, M1L, M2L, K1L, K2L, K3L, K4L, K5L, K6L, K7R, F1L, F2L, F3L, B14R, B15R, B16R, B17L, B18R, B19R, and B20R, and optionally a deletion in the B8R gene; (b) deletions in the following genes in the 3′ ITR: B21R, B22R, B23R, B24R, B25R, B26R, B27R, B28R, and B29R; (c) a first transgene comprising a first nucleotide sequence encoding an antibody or antigen-binding fragment thereof that specifically binds to CTLA-4, wherein the first nucleotide sequence is in the same orientation as endogenous vaccinia virus genes that flank the first nucleotide sequence, and wherein the first transgene is inserted between the partial C2L and F3L vaccinia genes; (d) a second transgene comprising a second nucleotide sequence encoding an IL-12 polypeptide, wherein the second nucleotide sequence is in the same orientation as endogenous vaccinia virus genes that flank the second nucleotide sequence, and wherein the second transgene is inserted into the locus of the deletion in the B8R gene; and (e) a third transgene comprising a third nucleotide sequence encoding FLT3L; wherein the deletions in the C2L, F3L, B14R, and B29R vaccinia genes are partial deletions, wherein the third nucleotide sequence is in the same orientation as endogenous vaccinia virus genes that flank the third nucleotide sequence, wherein the third transgene is inserted into the locus of the deletion in the B8R gene, and wherein the third transgene is downstream of the second transgene; and wherein the nucleic acid further comprises: (i) a nucleotide sequence comprising at least one promoter operably linked to the first nucleotide sequence, wherein the at least one promoter operably linked to the first nucleotide sequence is an H5R promoter; (ii) a nucleotide sequence comprising at least one promoter operably linked to the second nucleotide sequence, wherein the at least one promoter operably linked to the second nucleotide sequence is a late promoter that comprises the nucleotide sequence of SEQ ID NO: 561; and (iii) a nucleotide sequence comprising at least one promoter operably linked to the third nucleotide sequence, wherein the at least one promoter operably linked to the third nucleotide sequence is a B8R promoter and a B19R promoter. In a particular embodiment, the nucleic acid comprises a recombinant vaccinia virus genome that comprises a deletion in the B8R gene. In a particular embodiment, the B8R promoter comprises the nucleotide sequence of SEQ ID NO: 564. In a particular embodiment, the B19R promoter comprises the nucleotide sequence of SEQ ID NO: 565.

[0089] In a specific embodiment, any one, two or three of the first transgene, the second transgene and the third transgene is/are inserted between the partial C2L and F3L vaccinia genes (that is, is/are present between the partial C2L and F3L genes). In a specific embodiment, any one, two or three of the the first transgene, the second transgene and the third transgene is/are inserted between the portion of the C2L vaccinia gene that remains and the portion of the F3L vaccinia gene that remains.

[0090] In a specific embodiment, any one, two or three of the first transgene, the second transgene and the third transgene is/are inserted in the locus of the deletion in the B8R gene (that is, is/are present in the locus of the B8R gene).

[0091] In a specific embodiment, any one, two or three of the first transgene, the second transgene and the third transgene is/are inserted between the partial B13R and B29R vaccinia genes (that is, is/are present between the partial B13R and B29R genes). In a specific embodiment, any one, two or three of the the first transgene, the second transgene and the third transgene is/are inserted between the portion of the B13R vaccinia gene that remains and the portion of the B29R vaccinia gene that remains.

[0092] In a specific embodiment, the first transgene is inserted between the partial C2L and F3L vaccinia genes (that is, is present between the partial C2L and F3L genes), the second transgene is inserted into the locus of the deletion in the B8R gene (that is, is present in the locus of the deletion in the B8R gene) and the third transgene is inserted between the partial B14R and B29R vaccinia genes (that is, is present between the partial B14R and B29R vaccinia genes). In a specific embodiment, the first transgene is inserted between the portion of the C2L vaccinia gene that remains and the portion of the F3L vaccinia gene that remains, the second transgene is inserted into the locus of the deletion in the B8R gene and the third transgene is inserted between the portion of the B14R vaccinia gene that remains and portion of the B29R vaccinia gene that remains.

[0093] In a specific embodiment, the second transgene is inserted between the partial C2L and F3L vaccinia genes (that is, is present between the partial C2L and F3L genes), the third transgene is inserted into the locus of the deletion in the B8R gene (that is, is present in the locus of the deletion in the B8R gene) and the first transgene is inserted between the partial B14R and B29R vaccinia genes (that is, is present between the partial B14R and B29R vaccinia genes). In a specific embodiment, the second transgene is inserted between the portion of the C2L vaccinia gene that remains and the portion of the F3L vaccinia gene that remains, the second transgene is inserted into the locus of the deletion in the B8R gene and the first transgene is inserted between the portion of the B14R vaccinia gene that remains and portion of the B29R vaccinia gene that remains.

[0094] In a specific embodiment, the third transgene is inserted between the partial C2L and F3L vaccinia genes (that is, is present between the partial C2L and F3L genes), the second transgene is inserted into the locus of the deletion in the B8R gene (that is, is present in the locus of the deletion in the B8R gene) and the first transgene is inserted between the partial B14R and B29R vaccinia genes (that is, is present between the partial B14R and B29R vaccinia genes). In a specific embodiment, the third transgene is inserted between the portion of the C2L vaccinia gene that remains and the portion of the F3L vaccinia gene that remains, the second transgene is inserted into the locus of the deletion in the B8R gene and the first transgene is inserted between the portion of the B14R vaccinia gene that remains and portion of the B29R vaccinia gene that remains.

[0095] In a specific embodiment, the first transgene and the second transgene are inserted between the partial C2L and F3L vaccinia genes (that is, are present between the partial C2L and F3L genes), and the third transgene is inserted into the locus of the deletion in the B8R gene (that is, is present in the locus of the deletion in the B8R gene). In a specific embodiment, the first transgene and the second transgene are inserted between the portion of the C2L vaccinia gene that remains and the portion of the F3L vaccinia gene that remains, and the third transgene is inserted into the locus of the deletion in the B8R gene

[0096] In a specific embodiment, the first transgene and the second transgene are inserted between the partial C2L and F3L vaccinia genes (that is, are present between the partial C2L and F3L genes), and the third transgene is inserted between the partial B14R and B29R vaccinia genes (that is, is present between the partial B14R and B29R vaccinia genes). In a specific embodiment, the first transgene and the second transgene are inserted between the portion of the C2L vaccinia gene that remains and the portion of the F3L vaccinia gene that remains, and the third transgene is inserted between the portion of the B14R vaccinia gene that remains and portion of the B29R vaccinia gene that remains.

[0097] In a specific embodiment, the third transgene is inserted between the partial C2L and F3L vaccinia genes (that is, is present between the partial C2L and F3L genes), and the first transgene and the second transgene are inserted into the locus of the deletion in the B8R gene (that is, is are present in the locus of the deletion in the B8R gene). In a specific embodiment, the third transgene is inserted between the portion of the C2L vaccinia gene that remains and the portion of the F3L vaccinia gene that remains, and the first transgene and the second transgene are inserted into the locus of the deletion in the B8R gene

[0098] In a specific embodiment, the third transgene is inserted between the partial C2L and F3L vaccinia genes (that is, is present between the partial C2L and F3L genes), and the first transgene and the second transgene are inserted between the partial B14R and B29R vaccinia genes (that is, are present between the partial B14R and B29R vaccinia genes). In a specific embodiment, the third transgene is inserted between the portion of the C2L vaccinia gene that remains and the portion of the F3L vaccinia gene that remains, and the first transgene and the second transgene are inserted between the portion of the B14R vaccinia gene that remains and portion of the B29R vaccinia gene that remains.

[0099] In a specific embodiment, the third transgene is inserted into the locus of the deletion in the B8R gene (that is, is present in the locus of the deletion in the B8R gene) and the first transgene and the second transgene are inserted between the partial B13R and B29R vaccinia genes (that is, are present between the partial B13R and B29R genes). In a specific embodiment, the third transgene is inserted into the locus of the deletion in the B8R gene and the first transgene and the second transgene are inserted between the portion of the B13R vaccinia gene that remains and the portion of the B29R vaccinia gene that remains. In a specific embodiment, the third transgene is inserted between the partial B13R and B29R vaccinia genes (that is, is present between the partial B13R and B29R genes) and the first transgene and the second transgene are inserted into the locus of the deletion in the B8R gene (that is, are present in the locus of the deletion in the B8R gene). In a specific embodiment, the third transgene is inserted between the portion of the B13R vaccinia gene that remains and portion of the B29R vaccinia gene that remains and the first transgene and the second transgene are inserted into the locus of the deletion in the B8R gene.

[0100] In a specific embodiment, the first transgene, the second transgene and the third transgene are inserted between the partial C2L and F3L vaccinia genes (that is, are present between the partial C2L and F3L genes). In a specific embodiment, the first transgene, the second transgene and the third transgene are inserted between the portion of the C2L vaccinia gene that remains and the portion of the F3L vaccinia gene that remains.

[0101] In a specific embodiment, the first transgene, the second transgene and the third transgene are inserted into the locus of the deletion in the B8R gene (that is, are present in the locus of the B8R gene).

[0102] In a specific embodiment, the first transgene, the second transgene and the third transgene are inserted between the partial B14R and B29R vaccinia genes (that is, are present between the partial B14R and B29R genes). In a specific embodiment, the first transgene, the second transgene and the third transgene are inserted between the portion of the B14R vaccinia gene that remains and the portion of the B29R vaccinia gene that remains.

[0103] In another aspect, provided herein is a nucleic acid comprising a recombinant vaccinia virus genome, comprising: (a) deletions in the following genes: C2L, C1L, N1L, N2L, M1L, M2L, K1L, K2L, K3L, K4L, K5L, K6L, K7R, F1L, F2L, F3L, B14R, B15R, B16R, B17L, B18R, B19R, and B20R, and optionally a deletion in the B8R gene; (b) deletions in the following genes in the 3′ ITR: B21R, B22R, B23R, B24R, B25R, B26R, B27R, B28R, and B29R; (c) a first transgene comprising a first nucleotide sequence encoding an antibody or antigen-binding fragment thereof that specifically binds to CTLA-4, wherein the first nucleotide sequence is in the same orientation as endogenous vaccinia virus genes that flank the first nucleotide sequence, and wherein the first transgene is inserted between the partial B14R and B29R vaccinia genes; (d) a second transgene comprising a second nucleotide sequence encoding an IL-12 polypeptide, wherein the second nucleotide sequence is in the same orientation as endogenous vaccinia virus genes that flank the second nucleotide sequence, and wherein the second transgene is inserted into the locus of the deletion in the B8R gene; and (e) a third transgene comprising a third nucleotide sequence encoding FLT3L; wherein the deletions in the C2L, F3L, B14R, and B29R vaccinia genes are partial deletions, wherein the third nucleotide sequence is in the same orientation as endogenous vaccinia virus genes that flank the third nucleotide sequence, wherein the third transgene is inserted into the locus of the deletion in the B8R gene, and wherein the third transgene is upstream of the second transgene; and wherein the nucleic acid further comprises: (i) a nucleotide sequence comprising at least one promoter operably linked to the first nucleotide sequence, wherein the at least one promoter operably linked to the first nucleotide sequence is an H5R promoter; (ii) a nucleotide sequence comprising at least one promoter operably linked to the second nucleotide sequence, wherein the at least one promoter operably linked to the second nucleotide sequence is a late promoter that comprises the nucleotide sequence of SEQ ID NO: 561; and (iii) a nucleotide sequence comprising at least one promoter operably linked to the third nucleotide sequence, wherein the at least one promoter operably linked to the third nucleotide sequence is a B8R promoter and a B19R promoter. In a particular embodiment, the nucleic acid comprises a recombinant vaccinia virus genome that comprises a deletion in the B8R gene. In a particular embodiment, the B8R promoter comprises the nucleotide sequence of SEQ ID NO: 564.

[0104] In another aspect, provided herein is a nucleic acid comprising a recombinant vaccinia virus genome, comprising: (a) deletions in the following genes: C2L, C1L, N1L, N2L, M1L, M2L, K1L, K2L, K3L, K4L, K5L, K6L, K7R, F1L, F2L, F3L, B14R, B15R, B16R, B17L, B18R, B19R, and B20R, and optionally a deletion in the B8R gene; (b) deletions in the following genes in the 3′ ITR: B21R, B22R, B23R, B24R, B25R, B26R, B27R, B28R, and B29R; (c) a first transgene comprising a first nucleotide sequence encoding an antibody or antigen-binding fragment thereof that specifically binds to CTLA-4, wherein the first nucleotide sequence is in the same orientation as endogenous vaccinia virus genes that flank the first nucleotide sequence, and wherein the first transgene is inserted between the partial B14R and B29R vaccinia genes; (d) a second transgene comprising a second nucleotide sequence encoding an IL-12 polypeptide, wherein the second nucleotide sequence is in the same orientation as endogenous vaccinia virus genes that flank the second nucleotide sequence, and wherein the second transgene is inserted into the locus of the deletion in the B8R gene; and (e) a third transgene comprising a third nucleotide sequence encoding FLT3L; wherein the deletions in the C2L, F3L, B14R, and B29R vaccinia genes are partial deletions, wherein the third nucleotide sequence is in the same orientation as endogenous vaccinia virus genes that flank the third nucleotide sequence, wherein the third transgene is inserted into the locus of the deletion in the B8R gene, and wherein the third transgene is downstream of the second transgene; and wherein the nucleic acid further comprises: (i) a nucleotide sequence comprising at least one promoter operably linked to the first nucleotide sequence, wherein the at least one promoter operably linked to the first nucleotide sequence is an H5R promoter; (ii) a nucleotide sequence comprising at least one promoter operably linked to the second nucleotide sequence, wherein the at least one promoter operably linked to the second nucleotide sequence is a late promoter that comprises the nucleotide sequence of SEQ ID NO: 561; and (iii) a nucleotide sequence comprising at least one promoter operably linked to the third nucleotide sequence, wherein the at least one promoter operably linked to the third nucleotide sequence is a B8R promoter and a B19R promoter. In a particular embodiment, the nucleic acid comprises a recombinant vaccinia virus genome that comprises a deletion in the B8R gene. In a particular embodiment, the B8R promoter comprises the nucleotide sequence of SEQ ID NO: 564.

[0105] In another aspect, provided herein is a nucleic acid comprising a recombinant vaccinia virus genome, comprising: (a) a vaccinia virus nucleotide sequence of SEQ ID NO: 210, which comprises partial C2L, F3L, B14R, and B29R vaccinia genes and which comprises a deletion in the B8R gene; (b) a first transgene comprising a first nucleotide sequence encoding an antibody that specifically binds to Cytotoxic T-lymphocyte Associated Protein 4 (CTLA-4), wherein the first nucleotide sequence is set forth in SEQ ID NO: 214; (c) a second transgene comprising a second nucleotide sequence encoding an Interleukin 12 (IL-12) polypeptide, wherein the second nucleotide sequence is set forth in SEQ ID NO: 215; and (d) a third transgene comprising a third nucleotide sequence encoding FMS-like tyrosine kinase 3 ligand (FLT3L), wherein the third nucleotide sequence is set forth in SEQ ID NO: 216.

[0106] In some embodiments, the first nucleotide sequence is in the same orientation as endogenous vaccinia virus genes that flank the first nucleotide sequence, the second nucleotide sequence is in the same orientation as endogenous vaccinia virus genes that flank the second nucleotide sequence, and the third nucleotide sequence is in the same orientation as endogenous vaccinia virus genes that flank the third nucleotide sequence.

[0107] In certain embodiments, the nucleic acid further comprises a nucleotide sequence comprising at least one promoter operably linked to the first nucleotide sequence encoding the anti-CTLA-4 antibody. In a specific embodiment, the at least one promoter operably linked to the first nucleotide sequence encoding the anti-CTLA-4 antibody is an H5R promoter, a pS promoter, or a LEO promoter. In another specific embodiment, the at least one promoter operably linked to the first nucleotide sequence encoding the anti-CTLA-4 antibody is an H5R promoter.

[0108] In certain embodiments, the nucleic acid further comprises a nucleotide sequence comprising at least one promoter operably linked to the second nucleotide sequence encoding the IL-12 polypeptide. In a specific embodiment, the at least one promoter operably linked to the second nucleotide sequence encoding the IL-12 polypeptide is a late promoter. In a further specific embodiment, the late promoter comprises the nucleotide sequence of SEQ ID NO: 561, an F17R promoter, or a D13L promoter. In another further specific embodiment, the late promoter comprises the nucleotide sequence of SEQ ID NO: 561. In another embodiment, the F17R promoter comprises the nucleotide sequence of SEQ ID NO:563. In yet another embodiment, the D13L promoter comprises the nucleotide sequence of SEQ ID NO:562.

[0109] In certain embodiments, the nucleic acid further comprises a nucleotide sequence comprising at least one promoter operably linked to the third nucleotide sequence encoding FLT3L. In a specific embodiment, the at least one promoter operably linked to the third nucleotide sequence encoding FLT3L is a B8R promoter, a B19R promoter, a E3L promoter, an F11L promoter, or a B2R promoter. In another specific embodiment, the at least one promoter operably linked to the third nucleotide sequence encoding FLT3L is a B8R promoter. In another specific embodiment, the at least one promoter operably linked to the third nucleotide sequence encoding FLT3L is a B19R promoter. In another specific embodiment, the at least one promoter operably linked to the third nucleotide sequence encoding FLT3L is a B8R promoter and a B19R promoter. In a particular embodiment, the B8R promoter comprises the nucleotide sequence of SEQ ID NO: 564. In a particular embodiment, the B19R promoter comprises the nucleotide sequence of SEQ ID NO: 565. In a particular embodiment, the E3L promoter comprises the nucleotide sequence of SEQ ID NO: 567. In a particular embodiment, the F11L promoter comprises the nucleotide sequence of SEQ ID NO: 568. In a particular embodiment, the B2R promoter comprises the nucleotide sequence of SEQ ID NO: 569.

[0110] In another aspect, provided herein is a nucleic acid comprising a recombinant vaccinia virus genome, comprising: (a) a vaccinia virus nucleotide sequence of SEQ ID NO: 210, which comprises partial C2L, F3L, B14R, and B29R vaccinia genes and which comprises a deletion in the B8R gene; (b) a first transgene comprising a first nucleotide sequence encoding an antibody that specifically binds to CTLA-4, wherein the first nucleotide sequence is set forth in SEQ ID NO: 214; (c) a second transgene comprising a second nucleotide sequence encoding an IL-12 polypeptide, wherein the second nucleotide sequence is set forth in SEQ ID NO: 215; and (d) a third transgene comprising a third nucleotide sequence encoding FLT3L, wherein the third nucleotide sequence is set forth in SEQ ID NO: 216; wherein the nucleic acid further comprises: (i) a nucleotide sequence comprising at least one promoter operably linked to the first nucleotide sequence, wherein the at least one promoter operably linked to the first nucleotide sequence is an H5R promoter; (ii) a nucleotide sequence comprising at least one promoter operably linked to the second nucleotide sequence, wherein the at least one promoter operably linked to the second nucleotide sequence is a late promoter that comprises the nucleotide sequence of SEQ ID NO: 561; and (iii) a nucleotide sequence comprising at least one promoter operably linked to the third nucleotide sequence, wherein the at least one promoter operably linked to the third nucleotide sequence is a B8R promoter and a B19R promoter. In specific embodiments, the first nucleotide sequence is in the same orientation as endogenous vaccinia virus genes that flank the first nucleotide sequence, the second nucleotide sequence is in the same orientation as endogenous vaccinia virus genes that flank the second nucleotide sequence, and the third nucleotide sequence is in the same orientation as endogenous vaccinia virus genes that flank the third nucleotide sequence. In specific embodiments, the first transgene is inserted between the partial C2L and F3L vaccinia genes in SEQ ID NO: 210, and the second transgene and the third transgene are inserted into the locus of the deletion in the B8R gene. In specific embodiments, the first transgene is inserted between the partial B14R and B29R vaccinia genes in SEQ ID NO: 210, and the second transgene and the third transgene are inserted into the locus of the deletion in the B8R gene. In specific embodiments, the third transgene is upstream of the second transgene. In specific embodiments, the third transgene is downstream of the second transgene.

[0111] In another aspect, provided herein is a nucleic acid comprising a recombinant vaccinia virus genome, comprising: (a) a vaccinia virus nucleotide sequence of SEQ ID NO: 210, which comprises partial C2L, F3L, B14R, and B29R vaccinia genes and which comprises a deletion in the B8R gene; (b) a first transgene comprising a first nucleotide sequence encoding an antibody that specifically binds to CTLA-4, wherein the first nucleotide sequence is set forth in SEQ ID NO: 214, and wherein the first nucleotide sequence is in the same orientation as endogenous vaccinia virus genes that flank the first nucleotide sequence and the first transgene is inserted between the partial C2L and F3L vaccinia genes in SEQ ID NO: 210; (c) a second transgene comprising a second nucleotide sequence encoding an IL-12 polypeptide, wherein the second nucleotide sequence is set forth in SEQ ID NO: 215, and wherein the second nucleotide sequence is in the same orientation as endogenous vaccinia virus genes that flank the second nucleotide sequence and the second transgene is inserted into the locus of the deletion in the B8R gene; and (d) a third transgene comprising a third nucleotide sequence encoding FLT3L, wherein the third nucleotide sequence is set forth in SEQ ID NO: 216, wherein the third nucleotide sequence is in the same orientation as endogenous vaccinia virus genes that flank the third nucleotide sequence and the third transgene is inserted into the locus of the deletion in the B8R gene, and wherein the third transgene is upstream of the second transgene; wherein the nucleic acid further comprises: (i) a nucleotide sequence comprising at least one promoter operably linked to the first nucleotide sequence, wherein the at least one promoter operably linked to the first nucleotide sequence is an H5R promoter; (ii) a nucleotide sequence comprising at least one promoter operably linked to the second nucleotide sequence, wherein the at least one promoter operably linked to the second nucleotide sequence is a late promoter that comprises the nucleotide sequence of SEQ ID NO: 561; and (iii) a nucleotide sequence comprising at least one promoter operably linked to the third nucleotide sequence, wherein the at least one promoter operably linked to the third nucleotide sequence is a B8R promoter or a B19R promoter. In specific embodiments, the at least one promoter operably linked to the third nucleotide sequence is a B8R promoter and a B19R promoter. In specific embodiments, the B8R promoter comprises the nucleotide sequence of SEQ ID NO: 564 and the B19R promoter comprises the nucleotide sequence of SEQ ID NO: 565. In specific embodiments, the at least one promoter operatively linked to the first nucleotide sequence is an H5R early promoter or an H5R late promoter. In specific embodiments, the at least one promoter operatively linked to the first nucleotide sequence is an H5R early promoter and an H5R late promoter. In specific embodiments, the H5R early promoter comprises the nucleotide sequence of SEQ ID NO: 553 and the H5R late promoter comprises the nucleotide sequence of SEQ ID NO: 554.

[0112] In another aspect, provided herein is a nucleic acid comprising a recombinant vaccinia virus genome, comprising: (a) a vaccinia virus nucleotide sequence of SEQ ID NO: 210, which comprises partial C2L, F3L, B14R, and B29R vaccinia genes and which comprises a deletion in the B8R gene; (b) a first transgene comprising a first nucleotide sequence encoding an antibody that specifically binds to CTLA-4, wherein the first nucleotide sequence is set forth in SEQ ID NO: 214, and wherein the first nucleotide sequence is in the same orientation as endogenous vaccinia virus genes that flank the first nucleotide sequence and the first transgene is inserted between the partial C2L and F3L vaccinia genes in SEQ ID NO: 210; (c) a second transgene comprising a second nucleotide sequence encoding an IL-12 polypeptide, wherein the second nucleotide sequence is set forth in SEQ ID NO: 215, and wherein the second nucleotide sequence is in the same orientation as endogenous vaccinia virus genes that flank the second nucleotide sequence and the second transgene is inserted into the locus of the deletion in the B8R gene; and (d) a third transgene comprising a third nucleotide sequence encoding FLT3L, wherein the third nucleotide sequence is set forth in SEQ ID NO: 216, wherein the third nucleotide sequence is in the same orientation as endogenous vaccinia virus genes that flank the third nucleotide sequence and the third transgene is inserted into the locus of the deletion in the B8R gene, and wherein the third transgene is downstream of the second transgene; wherein the nucleic acid further comprises: (i) a nucleotide sequence comprising at least one promoter operably linked to the first nucleotide sequence, wherein the at least one promoter operably linked to the first nucleotide sequence is an H5R promoter; (ii) a nucleotide sequence comprising at least one promoter operably linked to the second nucleotide sequence, wherein the at least one promoter operably linked to the second nucleotide sequence is a late promoter that comprises the nucleotide sequence of SEQ ID NO: 561; and (iii) a nucleotide sequence comprising at least one promoter operably linked to the third nucleotide sequence, wherein the at least one promoter operably linked to the third nucleotide sequence is a B8R promoter or a B19R promoter. In specific embodiments, the at least one promoter operably linked to the third nucleotide sequence is a B8R promoter and a B19R promoter. In specific embodiments, the B8R promoter comprises the nucleotide sequence of SEQ ID NO: 564 and the B19R promoter comprises the nucleotide sequence of SEQ ID NO: 565. In specific embodiments, the at least one promoter operatively linked to the first nucleotide sequence is an H5R early promoter or an H5R late promoter. In specific embodiments, the at least one promoter operatively linked to the first nucleotide sequence is an H5R early promoter and an H5R late promoter. In specific embodiments, the H5R early promoter comprises the nucleotide sequence of SEQ ID NO: 553 and the H5R late promoter comprises the nucleotide sequence of SEQ ID NO: 554.

[0113] In another aspect, provided herein is a nucleic acid comprising a recombinant vaccinia virus genome, comprising: (a) a vaccinia virus nucleotide sequence of SEQ ID NO: 210, which comprises partial C2L, F3L, B14R, and B29R vaccinia genes and which comprises a deletion in the B8R gene; (b) a first transgene comprising a first nucleotide sequence encoding an antibody that specifically binds to CTLA-4, wherein the first nucleotide sequence is set forth in SEQ ID NO: 214, and wherein the first nucleotide sequence is in the same orientation as endogenous vaccinia virus genes that flank the first nucleotide sequence and the first transgene is inserted between the partial B14R and B29R vaccinia genes in SEQ ID NO: 210; (c) a second transgene comprising a second nucleotide sequence encoding an IL-12 polypeptide, wherein the second nucleotide sequence is set forth in SEQ ID NO: 215, and wherein the second nucleotide sequence is in the same orientation as endogenous vaccinia virus genes that flank the second nucleotide sequence and the second transgene is inserted into the locus of the deletion in the B8R gene; and (d) a third transgene comprising a third nucleotide sequence encoding FLT3L, wherein the third nucleotide sequence is set forth in SEQ ID NO: 216, wherein the third nucleotide sequence is in the same orientation as endogenous vaccinia virus genes that flank the third nucleotide sequence and the third transgene is inserted into the locus of the deletion in the B8R gene, and wherein the third transgene is upstream of the second transgene; wherein the nucleic acid further comprises: (i) a nucleotide sequence comprising at least one promoter operably linked to the first nucleotide sequence, wherein the at least one promoter operably linked to the first nucleotide sequence is an H5R promoter; (ii) a nucleotide sequence comprising at least one promoter operably linked to the second nucleotide sequence, wherein the at least one promoter operably linked to the second nucleotide sequence is a late promoter that comprises the nucleotide sequence of SEQ ID NO: 561; and (iii) a nucleotide sequence comprising at least one promoter operably linked to the third nucleotide sequence, wherein the at least one promoter operably linked to the third nucleotide sequence is a B8R promoter or a B19R promoter. In specific embodiments, the at least one promoter operably linked to the third nucleotide sequence is a B8R promoter and a B19R promoter. In specific embodiments, the B8R promoter comprises the nucleotide sequence of SEQ ID NO: 564 and the B19R promoter comprises the nucleotide sequence of SEQ ID NO: 565. In specific embodiments, the at least one promoter operatively linked to the first nucleotide sequence is an H5R early promoter or an H5R late promoter. In specific embodiments, the at least one promoter operatively linked to the first nucleotide sequence is an H5R early promoter and an H5R late promoter. In specific embodiments, the H5R early promoter comprises the nucleotide sequence of SEQ ID NO: 553 and the H5R late promoter comprises the nucleotide sequence of SEQ ID NO: 554.

[0114] In another aspect, provided herein is a nucleic acid comprising a recombinant vaccinia virus genome, comprising: (a) a vaccinia virus nucleotide sequence of SEQ ID NO: 210, which comprises partial C2L, F3L, B14R, and B29R vaccinia genes and which comprises a deletion in the B8R gene; (b) a first transgene comprising a first nucleotide sequence encoding an antibody that specifically binds to CTLA-4, wherein the first nucleotide sequence is set forth in SEQ ID NO: 214, and wherein the first nucleotide sequence is in the same orientation as endogenous vaccinia virus genes that flank the first nucleotide sequence and the first transgene is inserted between the partial B14R and B29R vaccinia genes in SEQ ID NO: 210; (c) a second transgene comprising a second nucleotide sequence encoding an IL-12 polypeptide, wherein the second nucleotide sequence is set forth in SEQ ID NO: 215, and wherein the second nucleotide sequence is in the same orientation as endogenous vaccinia virus genes that flank the second nucleotide sequence and the second transgene is inserted into the locus of the deletion in the B8R gene; and (d) a third transgene comprising a third nucleotide sequence encoding FLT3L, wherein the third nucleotide sequence is set forth in SEQ ID NO: 216, wherein the third nucleotide sequence is in the same orientation as endogenous vaccinia virus genes that flank the third nucleotide sequence and the third transgene is inserted into the locus of the deletion in the B8R gene, and wherein the third transgene is downstream of the second transgene; wherein the nucleic acid further comprises: (i) a nucleotide sequence comprising at least one promoter operably linked to the first nucleotide sequence, wherein the at least one promoter operably linked to the first nucleotide sequence is an H5R promoter; (ii) a nucleotide sequence comprising at least one promoter operably linked to the second nucleotide sequence, wherein the at least one promoter operably linked to the second nucleotide sequence is a late promoter that comprises the nucleotide sequence of SEQ ID NO: 561; and (iii) a nucleotide sequence comprising at least one promoter operably linked to the third nucleotide sequence, wherein the at least one promoter operably linked to the third nucleotide sequence is a B8R promoter or a B19R promoter. In specific embodiments, the at least one promoter operably linked to the third nucleotide sequence is a B8R promoter and a B19R promoter. In specific embodiments, the B8R promoter comprises the nucleotide sequence of SEQ ID NO: 564 and the B19R promoter comprises the nucleotide sequence of SEQ ID NO: 565. In specific embodiments, the at least one promoter operatively linked to the first nucleotide sequence is an H5R early promoter or an H5R late promoter. In specific embodiments, the at least one promoter operatively linked to the first nucleotide sequence is an H5R early promoter and an H5R late promoter. In specific embodiments, the H5R early promoter comprises the nucleotide sequence of SEQ ID NO: 553 and the H5R late promoter comprises the nucleotide sequence of SEQ ID NO: 554.

[0115] In another aspect, provided herein is a nucleic acid comprising a recombinant vaccinia virus genome, comprising: (a) a vaccinia virus nucleotide sequence of SEQ ID NO: 210, which comprises partial C2L, F3L, B14R, and B29R vaccinia genes and which comprises a deletion in the B8R gene; (b) a first transgene comprising a first nucleotide sequence encoding an antibody that specifically binds to CTLA-4, wherein the first nucleotide sequence is set forth in SEQ ID NO: 214, and wherein the first nucleotide sequence is in the same orientation as endogenous vaccinia virus genes that flank the first nucleotide sequence and the first transgene is inserted between the partial C2L and F3L vaccinia genes in SEQ ID NO: 210; (c) a second transgene comprising a second nucleotide sequence encoding an IL-12 polypeptide, wherein the second nucleotide sequence is set forth in SEQ ID NO: 215, and wherein the second nucleotide sequence is in the same orientation as endogenous vaccinia virus genes that flank the second nucleotide sequence and the second transgene is inserted into the locus of the deletion in the B8R gene; and (d) a third transgene comprising a third nucleotide sequence encoding FLT3L, wherein the third nucleotide sequence is set forth in SEQ ID NO: 216, wherein the third nucleotide sequence is in the same orientation as endogenous vaccinia virus genes that flank the third nucleotide sequence and the third transgene is inserted into the locus of the deletion in the B8R gene, and wherein the third transgene is upstream of the second transgene; wherein the nucleic acid further comprises: (i) a nucleotide sequence comprising at least one promoter operably linked to the first nucleotide sequence, wherein the at least one promoter operably linked to the first nucleotide sequence is a pS promoter; (ii) a nucleotide sequence comprising at least one promoter operably linked to the second nucleotide sequence, wherein the at least one promoter operably linked to the second nucleotide sequence is a late promoter that comprises the nucleotide sequence of SEQ ID NO: 561; and (iii) a nucleotide sequence comprising at least one promoter operably linked to the third nucleotide sequence, wherein the at least one promoter operably linked to the third nucleotide sequence is a B8R promoter or a B19R promoter. In specific embodiments, the at least one promoter operably linked to the third nucleotide sequence is a B8R promoter and a B19R promoter. In specific embodiments, the B8R promoter comprises the nucleotide sequence of SEQ ID NO: 564 and the B19R promoter comprises the nucleotide sequence of SEQ ID NO: 565. In specific embodiments, the nucleotide sequence of the pS comprises the nucleotide sequence of SEQ ID NO: 555, SEQ ID NO: 556, or SEQ ID NO: 557.

[0116] In another aspect, provided herein is a nucleic acid comprising a recombinant vaccinia virus genome, comprising: (a) a vaccinia virus nucleotide sequence of SEQ ID NO: 210, which comprises partial C2L, F3L, B14R, and B29R vaccinia genes and which comprises a deletion in the B8R gene; (b) a first transgene comprising a first nucleotide sequence encoding an antibody that specifically binds to CTLA-4, wherein the first nucleotide sequence is set forth in SEQ ID NO: 214, and wherein the first nucleotide sequence is in the same orientation as endogenous vaccinia virus genes that flank the first nucleotide sequence and the first transgene is inserted between the partial C2L and F3L vaccinia genes in SEQ ID NO: 210; (c) a second transgene comprising a second nucleotide sequence encoding an IL-12 polypeptide, wherein the second nucleotide sequence is set forth in SEQ ID NO: 215, and wherein the second nucleotide sequence is in the same orientation as endogenous vaccinia virus genes that flank the second nucleotide sequence and the second transgene is inserted into the locus of the deletion in the B8R gene; and (d) a third transgene comprising a third nucleotide sequence encoding FLT3L, wherein the third nucleotide sequence is set forth in SEQ ID NO: 216, wherein the third nucleotide sequence is in the same orientation as endogenous vaccinia virus genes that flank the third nucleotide sequence and the third transgene is inserted into the locus of the deletion in the B8R gene, and wherein the third transgene is downstream of the second transgene; wherein the nucleic acid further comprises: (i) a nucleotide sequence comprising at least one promoter operably linked to the first nucleotide sequence, wherein the at least one promoter operably linked to the first nucleotide sequence is a pS promoter; (ii) a nucleotide sequence comprising at least one promoter operably linked to the second nucleotide sequence, wherein the at least one promoter operably linked to the second nucleotide sequence is a late promoter that comprises the nucleotide sequence of SEQ ID NO: 561; and (iii) a nucleotide sequence comprising at least one promoter operably linked to the third nucleotide sequence, wherein the at least one promoter operably linked to the third nucleotide sequence is a B8R promoter or a B19R promoter. In specific embodiments, the at least one promoter operably linked to the third nucleotide sequence is a B8R promoter and a B19R promoter. In specific embodiments, the B8R promoter comprises the nucleotide sequence of SEQ ID NO: 564 and the B19R promoter comprises the nucleotide sequence of SEQ ID NO: 565. In specific embodiments, the nucleotide sequence of the pS comprises the nucleotide sequence of SEQ ID NO: 555, SEQ ID NO: 556, or SEQ ID NO: 557.

[0117] In another aspect, provided herein is a nucleic acid comprising a recombinant vaccinia virus genome, comprising: (a) a vaccinia virus nucleotide sequence of SEQ ID NO: 210, which comprises partial C2L, F3L, B14R, and B29R vaccinia genes and which comprises a deletion in the B8R gene; (b) a first transgene comprising a first nucleotide sequence encoding an antibody that specifically binds to CTLA-4, wherein the first nucleotide sequence is set forth in SEQ ID NO: 214, and wherein the first nucleotide sequence is in the same orientation as endogenous vaccinia virus genes that flank the first nucleotide sequence and the first transgene is inserted between the partial B14R and B29R vaccinia genes in SEQ ID NO: 210; (c) a second transgene comprising a second nucleotide sequence encoding an IL-12 polypeptide, wherein the second nucleotide sequence is set forth in SEQ ID NO: 215, and wherein the second nucleotide sequence is in the same orientation as endogenous vaccinia virus genes that flank the second nucleotide sequence and the second transgene is inserted into the locus of the deletion in the B8R gene; and (d) a third transgene comprising a third nucleotide sequence encoding FLT3L, wherein the third nucleotide sequence is set forth in SEQ ID NO: 216, wherein the third nucleotide sequence is in the same orientation as endogenous vaccinia virus genes that flank the third nucleotide sequence and the third transgene is inserted into the locus of the deletion in the B8R gene, and wherein the third transgene is upstream of the second transgene; wherein the nucleic acid further comprises: (i) a nucleotide sequence comprising at least one promoter operably linked to the first nucleotide sequence, wherein the at least one promoter operably linked to the first nucleotide sequence is a pS promoter; (ii) a nucleotide sequence comprising at least one promoter operably linked to the second nucleotide sequence, wherein the at least one promoter operably linked to the second nucleotide sequence is a late promoter that comprises the nucleotide sequence of SEQ ID NO: 561; and (iii) a nucleotide sequence comprising at least one promoter operably linked to the third nucleotide sequence, wherein the at least one promoter operably linked to the third nucleotide sequence is a B8R promoter or a B19R promoter. In specific embodiments, the at least one promoter operably linked to the third nucleotide sequence is a B8R promoter and a B19R promoter. In specific embodiments, the B8R promoter comprises the nucleotide sequence of SEQ ID NO: 564 and the B19R promoter comprises the nucleotide sequence of SEQ ID NO: 565. In specific embodiments, the nucleotide sequence of the pS comprises the nucleotide sequence of SEQ ID NO: 555, SEQ ID NO: 556, or SEQ ID NO: 557.

[0118] In another aspect, provided herein is a nucleic acid comprising a recombinant vaccinia virus genome, comprising: (a) a vaccinia virus nucleotide sequence of SEQ ID NO: 210, which comprises partial C2L, F3L, B14R, and B29R vaccinia genes and which comprises a deletion in the B8R gene; (b) a first transgene comprising a first nucleotide sequence encoding an antibody that specifically binds to CTLA-4, wherein the first nucleotide sequence is set forth in SEQ ID NO: 214, and wherein the first nucleotide sequence is in the same orientation as endogenous vaccinia virus genes that flank the first nucleotide sequence and the first transgene is inserted between the partial B14R and B29R vaccinia genes in SEQ ID NO: 210; (c) a second transgene comprising a second nucleotide sequence encoding an IL-12 polypeptide, wherein the second nucleotide sequence is set forth in SEQ ID NO: 215, and wherein the second nucleotide sequence is in the same orientation as endogenous vaccinia virus genes that flank the second nucleotide sequence and the second transgene is inserted into the locus of the deletion in the B8R gene; and (d) a third transgene comprising a third nucleotide sequence encoding FLT3L, wherein the third nucleotide sequence is set forth in SEQ ID NO: 216, wherein the third nucleotide sequence is in the same orientation as endogenous vaccinia virus genes that flank the third nucleotide sequence and the third transgene is inserted into the locus of the deletion in the B8R gene, and wherein the third transgene is downstream of the second transgene; wherein the nucleic acid further comprises: (i) a nucleotide sequence comprising at least one promoter operably linked to the first nucleotide sequence, wherein the at least one promoter operably linked to the first nucleotide sequence is a pS promoter; (ii) a nucleotide sequence comprising at least one promoter operably linked to the second nucleotide sequence, wherein the at least one promoter operably linked to the second nucleotide sequence is a late promoter that comprises the nucleotide sequence of SEQ ID NO: 561; and (iii) a nucleotide sequence comprising at least one promoter operably linked to the third nucleotide sequence, wherein the at least one promoter operably linked to the third nucleotide sequence is a B8R promoter or a B19R promoter. In specific embodiments, the at least one promoter operably linked to the third nucleotide sequence is a B8R promoter and a B19R promoter. In specific embodiments, the B8R promoter comprises the nucleotide sequence of SEQ ID NO: 564 and the B19R promoter comprises the nucleotide sequence of SEQ ID NO: 565. In specific embodiments, the nucleotide sequence of the pS comprises the nucleotide sequence of SEQ ID NO: 555, SEQ ID NO: 556, or SEQ ID NO: 557.

[0119] In another aspect, provided herein is a nucleic acid comprising a recombinant vaccinia virus genome, comprising: (a) a vaccinia virus nucleotide sequence of SEQ ID NO: 210, which comprises partial C2L, F3L, B14R, and B29R vaccinia genes and which comprises a deletion in the B8R gene; (b) a first transgene comprising a first nucleotide sequence encoding an antibody that specifically binds to CTLA-4, wherein the first nucleotide sequence is set forth in SEQ ID NO: 214, and wherein the first nucleotide sequence is in the same orientation as endogenous vaccinia virus genes that flank the first nucleotide sequence and the first transgene is inserted between the partial C2L and F3L vaccinia genes in SEQ ID NO: 210; (c) a second transgene comprising a second nucleotide sequence encoding an IL-12 polypeptide, wherein the second nucleotide sequence is set forth in SEQ ID NO: 215, and wherein the second nucleotide sequence is in the same orientation as endogenous vaccinia virus genes that flank the second nucleotide sequence and the second transgene is inserted into the locus of the deletion in the B8R gene; and (d) a third transgene comprising a third nucleotide sequence encoding FLT3L, wherein the third nucleotide sequence is set forth in SEQ ID NO: 216, wherein the third nucleotide sequence is in the same orientation as endogenous vaccinia virus genes that flank the third nucleotide sequence and the third transgene is inserted into the locus of the deletion in the B8R gene, and wherein the third transgene is upstream of the second transgene; wherein the nucleic acid further comprises: (i) a nucleotide sequence comprising at least one promoter operably linked to the first nucleotide sequence, wherein the at least one promoter operably linked to the first nucleotide sequence is an H5R promoter; (ii) a nucleotide sequence comprising at least one promoter operably linked to the second nucleotide sequence, wherein the at least one promoter operably linked to the second nucleotide sequence is an F17R promoter; and (iii) a nucleotide sequence comprising at least one promoter operably linked to the third nucleotide sequence, wherein the at least one promoter operably linked to the third nucleotide sequence is a B8R promoter or a B19R promoter. In specific embodiments, the at least one promoter operably linked to the third nucleotide sequence is a B8R promoter and a B19R promoter. In specific embodiments, the B8R promoter comprises the nucleotide sequence of SEQ ID NO: 564 and the B19R promoter comprises the nucleotide sequence of SEQ ID NO: 565. In specific embodiments, the at least one promoter operatively linked to the first nucleotide sequence is an H5R early promoter or an H5R late promoter. In specific embodiments, the at least one promoter operatively linked to the first nucleotide sequence is an H5R early promoter and an H5R late promoter. In specific embodiments, the H5R early promoter comprises the nucleotide sequence of SEQ ID NO: 553 and the H5R late promoter comprises the nucleotide sequence of SEQ ID NO: 554. In specific embodiments, nucleotide sequence of the F17R promoter comprises the nucleotide sequence of SEQ ID NO: 563.

[0120] In another aspect, provided herein is a nucleic acid comprising a recombinant vaccinia virus genome, comprising: (a) a vaccinia virus nucleotide sequence of SEQ ID NO: 210, which comprises partial C2L, F3L, B14R, and B29R vaccinia genes and which comprises a deletion in the B8R gene; (b) a first transgene comprising a first nucleotide sequence encoding an antibody that specifically binds to CTLA-4, wherein the first nucleotide sequence is set forth in SEQ ID NO: 214, and wherein the first nucleotide sequence is in the same orientation as endogenous vaccinia virus genes that flank the first nucleotide sequence and the first transgene is inserted between the partial C2L and F3L vaccinia genes in SEQ ID NO: 210; (c) a second transgene comprising a second nucleotide sequence encoding an IL-12 polypeptide, wherein the second nucleotide sequence is set forth in SEQ ID NO: 215, and wherein the second nucleotide sequence is in the same orientation as endogenous vaccinia virus genes that flank the second nucleotide sequence and the second transgene is inserted into the locus of the deletion in the B8R gene; and (d) a third transgene comprising a third nucleotide sequence encoding FLT3L, wherein the third nucleotide sequence is set forth in SEQ ID NO: 216, wherein the third nucleotide sequence is in the same orientation as endogenous vaccinia virus genes that flank the third nucleotide sequence and the third transgene is inserted into the locus of the deletion in the B8R gene, and wherein the third transgene is downstream of the second transgene; wherein the nucleic acid further comprises: (i) a nucleotide sequence comprising at least one promoter operably linked to the first nucleotide sequence, wherein the at least one promoter operably linked to the first nucleotide sequence is an H5R promoter; (ii) a nucleotide sequence comprising at least one promoter operably linked to the second nucleotide sequence, wherein the at least one promoter operably linked to the second nucleotide sequence is an F17R promoter; and (iii) a nucleotide sequence comprising at least one promoter operably linked to the third nucleotide sequence, wherein the at least one promoter operably linked to the third nucleotide sequence is a B8R promoter or a B19R promoter. In specific embodiments, the at least one promoter operably linked to the third nucleotide sequence is a B8R promoter and a B19R promoter. In specific embodiments, the B8R promoter comprises the nucleotide sequence of SEQ ID NO: 564 and the B19R promoter comprises the nucleotide sequence of SEQ ID NO: 565. In specific embodiments, the at least one promoter operatively linked to the first nucleotide sequence is an H5R early promoter or an H5R late promoter. In specific embodiments, the at least one promoter operatively linked to the first nucleotide sequence is an H5R early promoter and an H5R late promoter. In specific embodiments, the H5R early promoter comprises the nucleotide sequence of SEQ ID NO: 553 and the H5R late promoter comprises the nucleotide sequence of SEQ ID NO: 554. In specific embodiments, nucleotide sequence of the F17R promoter comprises the nucleotide sequence of SEQ ID NO: 563.

[0121] In another aspect, provided herein is a nucleic acid comprising a recombinant vaccinia virus genome, comprising: (a) a vaccinia virus nucleotide sequence of SEQ ID NO: 210, which comprises partial C2L, F3L, B14R, and B29R vaccinia genes and which comprises a deletion in the B8R gene; (b) a first transgene comprising a first nucleotide sequence encoding an antibody that specifically binds to CTLA-4, wherein the first nucleotide sequence is set forth in SEQ ID NO: 214, and wherein the first nucleotide sequence is in the same orientation as endogenous vaccinia virus genes that flank the first nucleotide sequence and the first transgene is inserted between the partial B14R and B29R vaccinia genes in SEQ ID NO: 210; (c) a second transgene comprising a second nucleotide sequence encoding an IL-12 polypeptide, wherein the second nucleotide sequence is set forth in SEQ ID NO: 215, and wherein the second nucleotide sequence is in the same orientation as endogenous vaccinia virus genes that flank the second nucleotide sequence and the second transgene is inserted into the locus of the deletion in the B8R gene; and (d) a third transgene comprising a third nucleotide sequence encoding FLT3L, wherein the third nucleotide sequence is set forth in SEQ ID NO: 216, wherein the third nucleotide sequence is in the same orientation as endogenous vaccinia virus genes that flank the third nucleotide sequence and the third transgene is inserted into the locus of the deletion in the B8R gene, and wherein the third transgene is upstream of the second transgene; wherein the nucleic acid further comprises: (i) a nucleotide sequence comprising at least one promoter operably linked to the first nucleotide sequence, wherein the at least one promoter operably linked to the first nucleotide sequence is an H5R promoter; (ii) a nucleotide sequence comprising at least one promoter operably linked to the second nucleotide sequence, wherein the at least one promoter operably linked to the second nucleotide sequence is an F17R promoter; and (iii) a nucleotide sequence comprising at least one promoter operably linked to the third nucleotide sequence, wherein the at least one promoter operably linked to the third nucleotide sequence is a B8R promoter or a B19R promoter. In specific embodiments, the at least one promoter operably linked to the third nucleotide sequence is a B8R promoter and a B19R promoter. In specific embodiments, the B8R promoter comprises the nucleotide sequence of SEQ ID NO: 564 and the B19R promoter comprises the nucleotide sequence of SEQ ID NO: 565. In specific embodiments, the at least one promoter operatively linked to the first nucleotide sequence is an H5R early promoter or an H5R late promoter. In specific embodiments, the at least one promoter operatively linked to the first nucleotide sequence is an H5R early promoter and an H5R late promoter. In specific embodiments, the H5R early promoter comprises the nucleotide sequence of SEQ ID NO: 553 and the H5R late promoter comprises the nucleotide sequence of SEQ ID NO: 554. In specific embodiments, nucleotide sequence of the F17R promoter comprises the nucleotide sequence of SEQ ID NO: 563.

[0122] In another aspect, provided herein is a nucleic acid comprising a recombinant vaccinia virus genome, comprising: (a) a vaccinia virus nucleotide sequence of SEQ ID NO: 210, which comprises partial C2L, F3L, B14R, and B29R vaccinia genes and which comprises a deletion in the B8R gene; (b) a first transgene comprising a first nucleotide sequence encoding an antibody that specifically binds to CTLA-4, wherein the first nucleotide sequence is set forth in SEQ ID NO: 214, and wherein the first nucleotide sequence is in the same orientation as endogenous vaccinia virus genes that flank the first nucleotide sequence and the first transgene is inserted between the partial B14R and B29R vaccinia genes in SEQ ID NO: 210; (c) a second transgene comprising a second nucleotide sequence encoding an IL-12 polypeptide, wherein the second nucleotide sequence is set forth in SEQ ID NO: 215, and wherein the second nucleotide sequence is in the same orientation as endogenous vaccinia virus genes that flank the second nucleotide sequence and the second transgene is inserted into the locus of the deletion in the B8R gene; and (d) a third transgene comprising a third nucleotide sequence encoding FLT3L, wherein the third nucleotide sequence is set forth in SEQ ID NO: 216, wherein the third nucleotide sequence is in the same orientation as endogenous vaccinia virus genes that flank the third nucleotide sequence and the third transgene is inserted into the locus of the deletion in the B8R gene, and wherein the third transgene is downstream of the second transgene; wherein the nucleic acid further comprises: (i) a nucleotide sequence comprising at least one promoter operably linked to the first nucleotide sequence, wherein the at least one promoter operably linked to the first nucleotide sequence is an H5R promoter; (ii) a nucleotide sequence comprising at least one promoter operably linked to the second nucleotide sequence, wherein the at least one promoter operably linked to the second nucleotide sequence is an F17R promoter; and (iii) a nucleotide sequence comprising at least one promoter operably linked to the third nucleotide sequence, wherein the at least one promoter operably linked to the third nucleotide sequence is a B8R promoter and a B19R promoter. In specific embodiments, the at least one promoter operably linked to the third nucleotide sequence is a B8R promoter and a B19R promoter. In specific embodiments, the B8R promoter comprises the nucleotide sequence of SEQ ID NO: 564 and the B19R promoter comprises the nucleotide sequence of SEQ ID NO: 565. In specific embodiments, the at least one promoter operatively linked to the first nucleotide sequence is an H5R early promoter or an H5R late promoter. In specific embodiments, the at least one promoter operatively linked to the first nucleotide sequence is an H5R early promoter and an H5R late promoter. In specific embodiments, the H5R early promoter comprises the nucleotide sequence of SEQ ID NO: 553 and the H5R late promoter comprises the nucleotide sequence of SEQ ID NO: 554. In specific embodiments, nucleotide sequence of the F17R promoter comprises the nucleotide sequence of SEQ ID NO: 563.

[0123] In another aspect, provided herein is a nucleic acid comprising a recombinant vaccinia virus genome, comprising: (a) a vaccinia virus nucleotide sequence of SEQ ID NO: 210, which comprises partial C2L, F3L, B14R, and B29R vaccinia genes and which comprises a deletion in the B8R gene; (b) a first transgene comprising a first nucleotide sequence encoding an antibody that specifically binds to CTLA-4, wherein the first nucleotide sequence is set forth in SEQ ID NO: 214, and wherein the first nucleotide sequence is in the same orientation as endogenous vaccinia virus genes that flank the first nucleotide sequence and the first transgene is inserted between the partial C2L and F3L vaccinia genes in SEQ ID NO: 210; (c) a second transgene comprising a second nucleotide sequence encoding an IL-12 polypeptide, wherein the second nucleotide sequence is set forth in SEQ ID NO: 215, and wherein the second nucleotide sequence is in the same orientation as endogenous vaccinia virus genes that flank the second nucleotide sequence and the second transgene is inserted into the locus of the deletion in the B8R gene; and (d) a third transgene comprising a third nucleotide sequence encoding FLT3L, wherein the third nucleotide sequence is set forth in SEQ ID NO: 216, wherein the third nucleotide sequence is in the same orientation as endogenous vaccinia virus genes that flank the third nucleotide sequence and the third transgene is inserted into the locus of the deletion in the B8R gene, and wherein the third transgene is upstream of the second transgene; wherein the nucleic acid further comprises: (i) a nucleotide sequence comprising at least one promoter operably linked to the first nucleotide sequence, wherein the at least one promoter operably linked to the first nucleotide sequence is an H5R promoter; (ii) a nucleotide sequence comprising at least one promoter operably linked to the second nucleotide sequence, wherein the at least one promoter operably linked to the second nucleotide sequence is a late promoter that comprises the nucleotide sequence of SEQ ID NO: 561; and (iii) a nucleotide sequence comprising at least one promoter operably linked to the third nucleotide sequence, wherein the at least one promoter operably linked to the third nucleotide sequence is a E3L promoter. In specific embodiments, the at least one promoter operatively linked to the first nucleotide sequence is an H5R early promoter or an H5R late promoter. In specific embodiments, the at least one promoter operatively linked to the first nucleotide sequence is an H5R early promoter and an H5R late promoter. In specific embodiments, the H5R early promoter comprises the nucleotide sequence of SEQ ID NO: 553 and the H5R late promoter comprises the nucleotide sequence of SEQ ID NO: 554. In specific embodiments, nucleotide sequence of the E3L promoter comprises the nucleotide sequence of SEQ ID NO: 567.

[0124] In another aspect, provided herein is a nucleic acid comprising a recombinant vaccinia virus genome, comprising: (a) a vaccinia virus nucleotide sequence of SEQ ID NO: 210, which comprises partial C2L, F3L, B14R, and B29R vaccinia genes and which comprises a deletion in the B8R gene; (b) a first transgene comprising a first nucleotide sequence encoding an antibody that specifically binds to CTLA-4, wherein the first nucleotide sequence is set forth in SEQ ID NO: 214, and wherein the first nucleotide sequence is in the same orientation as endogenous vaccinia virus genes that flank the first nucleotide sequence and the first transgene is inserted between the partial C2L and F3L vaccinia genes in SEQ ID NO: 210; (c) a second transgene comprising a second nucleotide sequence encoding an IL-12 polypeptide, wherein the second nucleotide sequence is set forth in SEQ ID NO: 215, and wherein the second nucleotide sequence is in the same orientation as endogenous vaccinia virus genes that flank the second nucleotide sequence and the second transgene is inserted into the locus of the deletion in the B8R gene; and (d) a third transgene comprising a third nucleotide sequence encoding FLT3L, wherein the third nucleotide sequence is set forth in SEQ ID NO: 216, wherein the third nucleotide sequence is in the same orientation as endogenous vaccinia virus genes that flank the third nucleotide sequence and the third transgene is inserted into the locus of the deletion in the B8R gene, and wherein the third transgene is downstream of the second transgene; wherein the nucleic acid further comprises: (i) a nucleotide sequence comprising at least one promoter operably linked to the first nucleotide sequence, wherein the at least one promoter operably linked to the first nucleotide sequence is an H5R promoter; (ii) a nucleotide sequence comprising at least one promoter operably linked to the second nucleotide sequence, wherein the at least one promoter operably linked to the second nucleotide sequence is a late promoter that comprises the nucleotide sequence of SEQ ID NO: 561; and (iii) a nucleotide sequence comprising at least one promoter operably linked to the third nucleotide sequence, wherein the at least one promoter operably linked to the third nucleotide sequence is a E3L promoter. In specific embodiments, the at least one promoter operatively linked to the first nucleotide sequence is an H5R early promoter or an H5R late promoter. In specific embodiments, the at least one promoter operatively linked to the first nucleotide sequence is an H5R early promoter and an H5R late promoter. In specific embodiments, the H5R early promoter comprises the nucleotide sequence of SEQ ID NO: 553 and the H5R late promoter comprises the nucleotide sequence of SEQ ID NO: 554. In specific embodiments, nucleotide sequence of the E3L promoter comprises the nucleotide sequence of SEQ ID NO: 567.

[0125] In another aspect, provided herein is a nucleic acid comprising a recombinant vaccinia virus genome, comprising: (a) a vaccinia virus nucleotide sequence of SEQ ID NO: 210, which comprises partial C2L, F3L, B14R, and B29R vaccinia genes and which comprises a deletion in the B8R gene; (b) a first transgene comprising a first nucleotide sequence encoding an antibody that specifically binds to CTLA-4, wherein the first nucleotide sequence is set forth in SEQ ID NO: 214, and wherein the first nucleotide sequence is in the same orientation as endogenous vaccinia virus genes that flank the first nucleotide sequence and the first transgene is inserted between the partial B14R and B29R vaccinia genes in SEQ ID NO: 210; (c) a second transgene comprising a second nucleotide sequence encoding an IL-12 polypeptide, wherein the second nucleotide sequence is set forth in SEQ ID NO: 215, and wherein the second nucleotide sequence is in the same orientation as endogenous vaccinia virus genes that flank the second nucleotide sequence and the second transgene is inserted into the locus of the deletion in the B8R gene; and (d) a third transgene comprising a third nucleotide sequence encoding FLT3L, wherein the third nucleotide sequence is set forth in SEQ ID NO: 216, wherein the third nucleotide sequence is in the same orientation as endogenous vaccinia virus genes that flank the third nucleotide sequence and the third transgene is inserted into the locus of the deletion in the B8R gene, and wherein the third transgene is upstream of the second transgene; wherein the nucleic acid further comprises: (i) a nucleotide sequence comprising at least one promoter operably linked to the first nucleotide sequence, wherein the at least one promoter operably linked to the first nucleotide sequence is an H5R promoter; (ii) a nucleotide sequence comprising at least one promoter operably linked to the second nucleotide sequence, wherein the at least one promoter operably linked to the second nucleotide sequence is a late promoter that comprises the nucleotide sequence of SEQ ID NO: 561; and (iii) a nucleotide sequence comprising at least one promoter operably linked to the third nucleotide sequence, wherein the at least one promoter operably linked to the third nucleotide sequence is a E3L promoter. In specific embodiments, the at least one promoter operatively linked to the first nucleotide sequence is an H5R early promoter or an H5R late promoter. In specific embodiments, the at least one promoter operatively linked to the first nucleotide sequence is an H5R early promoter and an H5R late promoter. In specific embodiments, the H5R early promoter comprises the nucleotide sequence of SEQ ID NO: 553 and the H5R late promoter comprises the nucleotide sequence of SEQ ID NO: 554. In specific embodiments, nucleotide sequence of the E3L promoter comprises the nucleotide sequence of SEQ ID NO: 567.

[0126] In another aspect, provided herein is a nucleic acid comprising a recombinant vaccinia virus genome, comprising: (a) a vaccinia virus nucleotide sequence of SEQ ID NO: 210, which comprises partial C2L, F3L, B14R, and B29R vaccinia genes and which comprises a deletion in the B8R gene; (b) a first transgene comprising a first nucleotide sequence encoding an antibody that specifically binds to CTLA-4, wherein the first nucleotide sequence is set forth in SEQ ID NO: 214, and wherein the first nucleotide sequence is in the same orientation as endogenous vaccinia virus genes that flank the first nucleotide sequence and the first transgene is inserted between the partial B14R and B29R vaccinia genes in SEQ ID NO: 210; (c) a second transgene comprising a second nucleotide sequence encoding an IL-12 polypeptide, wherein the second nucleotide sequence is set forth in SEQ ID NO: 215, and wherein the second nucleotide sequence is in the same orientation as endogenous vaccinia virus genes that flank the second nucleotide sequence and the second transgene is inserted into the locus of the deletion in the B8R gene; and (d) a third transgene comprising a third nucleotide sequence encoding FLT3L, wherein the third nucleotide sequence is set forth in SEQ ID NO: 216, wherein the third nucleotide sequence is in the same orientation as endogenous vaccinia virus genes that flank the third nucleotide sequence and the third transgene is inserted into the locus of the deletion in the B8R gene, and wherein the third transgene is downstream of the second transgene; wherein the nucleic acid further comprises: (i) a nucleotide sequence comprising at least one promoter operably linked to the first nucleotide sequence, wherein the at least one promoter operably linked to the first nucleotide sequence is an H5R promoter; (ii) a nucleotide sequence comprising at least one promoter operably linked to the second nucleotide sequence, wherein the at least one promoter operably linked to the second nucleotide sequence is a late promoter that comprises the nucleotide sequence of SEQ ID NO: 561; and (iii) a nucleotide sequence comprising at least one promoter operably linked to the third nucleotide sequence, wherein the at least one promoter operably linked to the third nucleotide sequence is a E3L promoter. In specific embodiments, the at least one promoter operatively linked to the first nucleotide sequence is an H5R early promoter or an H5R late promoter. In specific embodiments, the at least one promoter operatively linked to the first nucleotide sequence is an H5R early promoter and an H5R late promoter. In specific embodiments, the H5R early promoter comprises the nucleotide sequence of SEQ ID NO: 553 and the H5R late promoter comprises the nucleotide sequence of SEQ ID NO: 554. In specific embodiments, nucleotide sequence of the E3L promoter comprises the nucleotide sequence of SEQ ID NO: 567.

[0127] In another aspect, provided herein is a nucleic acid comprising a recombinant vaccinia virus genome, comprising: (a) a vaccinia virus nucleotide sequence of SEQ ID NO: 210, which comprises partial C2L, F3L, B14R, and B29R vaccinia genes and which comprises a deletion in the B8R gene; (b) a first transgene comprising a first nucleotide sequence encoding an antibody that specifically binds to CTLA-4, wherein the first nucleotide sequence is set forth in SEQ ID NO: 214, and wherein the first nucleotide sequence is in the same orientation as endogenous vaccinia virus genes that flank the first nucleotide sequence and the first transgene is inserted between the partial C2L and F3L vaccinia genes in SEQ ID NO: 210; (c) a second transgene comprising a second nucleotide sequence encoding an IL-12 polypeptide, wherein the second nucleotide sequence is set forth in SEQ ID NO: 215, and wherein the second nucleotide sequence is in the same orientation as endogenous vaccinia virus genes that flank the second nucleotide sequence and the second transgene is inserted into the locus of the deletion in the B8R gene; and (d) a third transgene comprising a third nucleotide sequence encoding FLT3L, wherein the third nucleotide sequence is set forth in SEQ ID NO: 216, wherein the third nucleotide sequence is in the same orientation as endogenous vaccinia virus genes that flank the third nucleotide sequence and the third transgene is inserted into the locus of the deletion in the B8R gene, and wherein the third transgene is upstream of the second transgene; wherein the nucleic acid further comprises: (i) a nucleotide sequence comprising at least one promoter operably linked to the first nucleotide sequence, wherein the at least one promoter operably linked to the first nucleotide sequence is a pS promoter; (ii) a nucleotide sequence comprising at least one promoter operably linked to the second nucleotide sequence, wherein the at least one promoter operably linked to the second nucleotide sequence an F17R promoter; and (iii) a nucleotide sequence comprising at least one promoter operably linked to the third nucleotide sequence, wherein the at least one promoter operably linked to the third nucleotide sequence is a E3L promoter. In specific embodiments, the nucleotide sequence of the pS promoter comprises the nucleotide sequence of SEQ ID NO: 555, SEQ ID NO: 556, or SEQ ID NO: 557. In specific embodiments, the nucleotide sequence of the F17R promoter comprises the nucleotide sequence of SEQ ID NO: 563. In specific embodiments, the nucleotide sequence of the E3L promoter comprises the nucleotide sequence of SEQ ID NO: 567.

[0128] In another aspect, provided herein is a nucleic acid comprising a recombinant vaccinia virus genome, comprising: (a) a vaccinia virus nucleotide sequence of SEQ ID NO: 210, which comprises partial C2L, F3L, B14R, and B29R vaccinia genes and which comprises a deletion in the B8R gene; (b) a first transgene comprising a first nucleotide sequence encoding an antibody that specifically binds to CTLA-4, wherein the first nucleotide sequence is set forth in SEQ ID NO: 214, and wherein the first nucleotide sequence is in the same orientation as endogenous vaccinia virus genes that flank the first nucleotide sequence and the first transgene is inserted between the partial C2L and F3L vaccinia genes in SEQ ID NO: 210; (c) a second transgene comprising a second nucleotide sequence encoding an IL-12 polypeptide, wherein the second nucleotide sequence is set forth in SEQ ID NO: 215, and wherein the second nucleotide sequence is in the same orientation as endogenous vaccinia virus genes that flank the second nucleotide sequence and the second transgene is inserted into the locus of the deletion in the B8R gene; and (d) a third transgene comprising a third nucleotide sequence encoding FLT3L, wherein the third nucleotide sequence is set forth in SEQ ID NO: 216, wherein the third nucleotide sequence is in the same orientation as endogenous vaccinia virus genes that flank the third nucleotide sequence and the third transgene is inserted into the locus of the deletion in the B8R gene, and wherein the third transgene is downstream of the second transgene; wherein the nucleic acid further comprises: (i) a nucleotide sequence comprising at least one promoter operably linked to the first nucleotide sequence, wherein the at least one promoter operably linked to the first nucleotide sequence is a pS promoter; (ii) a nucleotide sequence comprising at least one promoter operably linked to the second nucleotide sequence, wherein the at least one promoter operably linked to the second nucleotide sequence is an F17R promoter; and (iii) a nucleotide sequence comprising at least one promoter operably linked to the third nucleotide sequence, wherein the at least one promoter operably linked to the third nucleotide sequence is a E3L promoter. In specific embodiments, the nucleotide sequence of the pS promoter comprises the nucleotide sequence of SEQ ID NO: 555, SEQ ID NO: 556, or SEQ ID NO: 557. In specific embodiments, the nucleotide sequence of the F17R promoter comprises the nucleotide sequence of SEQ ID NO: 563. In specific embodiments, the nucleotide sequence of the E3L promoter comprises the nucleotide sequence of SEQ ID NO: 567.

[0129] In another aspect, provided herein is a nucleic acid comprising a recombinant vaccinia virus genome, comprising: (a) a vaccinia virus nucleotide sequence of SEQ ID NO: 210, which comprises partial C2L, F3L, B14R, and B29R vaccinia genes and which comprises a deletion in the B8R gene; (b) a first transgene comprising a first nucleotide sequence encoding an antibody that specifically binds to CTLA-4, wherein the first nucleotide sequence is set forth in SEQ ID NO: 214, and wherein the first nucleotide sequence is in the same orientation as endogenous vaccinia virus genes that flank the first nucleotide sequence and the first transgene is inserted between the partial B14R and B29R vaccinia genes in SEQ ID NO: 210; (c) a second transgene comprising a second nucleotide sequence encoding an IL-12 polypeptide, wherein the second nucleotide sequence is set forth in SEQ ID NO: 215, and wherein the second nucleotide sequence is in the same orientation as endogenous vaccinia virus genes that flank the second nucleotide sequence and the second transgene is inserted into the locus of the deletion in the B8R gene; and (d) a third transgene comprising a third nucleotide sequence encoding FLT3L, wherein the third nucleotide sequence is set forth in SEQ ID NO: 216, wherein the third nucleotide sequence is in the same orientation as endogenous vaccinia virus genes that flank the third nucleotide sequence and the third transgene is inserted into the locus of the deletion in the B8R gene, and wherein the third transgene is upstream of the second transgene; wherein the nucleic acid further comprises: (i) a nucleotide sequence comprising at least one promoter operably linked to the first nucleotide sequence, wherein the at least one promoter operably linked to the first nucleotide sequence is a pS promoter; (ii) a nucleotide sequence comprising at least one promoter operably linked to the second nucleotide sequence, wherein the at least one promoter operably linked to the second nucleotide sequence is an F17R promoter; and (iii) a nucleotide sequence comprising at least one promoter operably linked to the third nucleotide sequence, wherein the at least one promoter operably linked to the third nucleotide sequence is a E3L promoter. In specific embodiments, the nucleotide sequence of the pS promoter comprises the nucleotide sequence of SEQ ID NO: 555, SEQ ID NO: 556, or SEQ ID NO: 557. In specific embodiments, the nucleotide sequence of the F17R promoter comprises the nucleotide sequence of SEQ ID NO: 563. In specific embodiments, the nucleotide sequence of the E3L promoter comprises the nucleotide sequence of SEQ ID NO: 567.

[0130] In another aspect, provided herein is a nucleic acid comprising a recombinant vaccinia virus genome, comprising: (a) a vaccinia virus nucleotide sequence of SEQ ID NO: 210, which comprises partial C2L, F3L, B14R, and B29R vaccinia genes and which comprises a deletion in the B8R gene; (b) a first transgene comprising a first nucleotide sequence encoding an antibody that specifically binds to CTLA-4, wherein the first nucleotide sequence is set forth in SEQ ID NO: 214, and wherein the first nucleotide sequence is in the same orientation as endogenous vaccinia virus genes that flank the first nucleotide sequence and the first transgene is inserted between the partial B14R and B29R vaccinia genes in SEQ ID NO: 210; (c) a second transgene comprising a second nucleotide sequence encoding an IL-12 polypeptide, wherein the second nucleotide sequence is set forth in SEQ ID NO: 215, and wherein the second nucleotide sequence is in the same orientation as endogenous vaccinia virus genes that flank the second nucleotide sequence and the second transgene is inserted into the locus of the deletion in the B8R gene; and (d) a third transgene comprising a third nucleotide sequence encoding FLT3L, wherein the third nucleotide sequence is set forth in SEQ ID NO: 216, wherein the third nucleotide sequence is in the same orientation as endogenous vaccinia virus genes that flank the third nucleotide sequence and the third transgene is inserted into the locus of the deletion in the B8R gene, and wherein the third transgene is downstream of the second transgene; wherein the nucleic acid further comprises: (i) a nucleotide sequence comprising at least one promoter operably linked to the first nucleotide sequence, wherein the at least one promoter operably linked to the first nucleotide sequence is a pS promoter; (ii) a nucleotide sequence comprising at least one promoter operably linked to the second nucleotide sequence, wherein the at least one promoter operably linked to the second nucleotide sequence is an F17R promoter; and (iii) a nucleotide sequence comprising at least one promoter operably linked to the third nucleotide sequence, wherein the at least one promoter operably linked to the third nucleotide sequence is a E3L promoter. In specific embodiments, the nucleotide sequence of the pS promoter comprises the nucleotide sequence of SEQ ID NO: 555, SEQ ID NO: 556, or SEQ ID NO: 557. In specific embodiments, the nucleotide sequence of the F17R promoter comprises the nucleotide sequence of SEQ ID NO: 563. In specific embodiments, the nucleotide sequence of the E3L promoter comprises the nucleotide sequence of SEQ ID NO: 567.

[0131] In some embodiments of the various embodiments and aspects described herein wherein the nucleic acid comprises the first transgene, the first transgene is inserted between the partial C2L and F3L vaccinia genes. In other embodiments of the various embodiments and aspects described herein wherein the nucleic acid comprises the first transgene, the first transgene is inserted into the locus of the deletion in the B8R gene. In other embodiments of the various embodiments and aspects described herein wherein the nucleic acid comprises the first transgene, the first transgene is inserted between the partial B14R and B29R vaccinia genes.

[0132] In some embodiments of the various embodiments and aspects described herein wherein the nucleic acid comprises the second transgene, the second transgene is inserted between the partial C2L and F3L vaccinia genes. In other embodiments of the various embodiments and aspects described herein wherein the nucleic acid comprises the second transgene, the second transgene is inserted into the locus of the deletion in the B8R gene. In other embodiments of the various embodiments and aspects described herein wherein the nucleic acid comprises the second transgene, the second transgene is inserted between the partial B14R and B29R vaccinia genes.

[0133] In some embodiments of the various embodiments and aspects described herein wherein the nucleic acid comprises the third transgene, the third transgene is inserted between the partial C2L and F3L vaccinia genes. In other embodiments of the various embodiments and aspects described herein wherein the nucleic acid comprises the third transgene, the third transgene is inserted into the locus of the deletion in the B8R gene. In other embodiments of the various embodiments and aspects described herein wherein the nucleic acid comprises the third transgene, the third transgene is inserted between the partial B14R and B29R vaccinia genes.

[0134] In some embodiments of the various embodiments and aspects described herein wherein the nucleic acid comprises the first transgene and the second transgene, the first transgene and the second transgene are inserted between the partial C2L and F3L vaccinia genes. In other embodiments of the various embodiments and aspects described herein wherein the nucleic acid comprises the first transgene and the second transgene, the first transgene and the second transgene are inserted into the locus of the deletion in the B8R gene. In other embodiments of the various embodiments and aspects described herein wherein the nucleic acid comprises the first transgene and the second transgene, the first transgene and the second transgene are inserted between the partial B14R and B29R vaccinia genes.

[0135] In some embodiments of the various embodiments and aspects described herein wherein the nucleic acid comprises the first transgene and the third transgene, the first transgene and the third transgene are inserted between the partial C2L and F3L vaccinia genes. In other embodiments of the various embodiments and aspects described herein wherein the nucleic acid comprises the first transgene and the third transgene, the first transgene and the third transgene are inserted into the locus of the deletion in the B8R gene. In other embodiments of the various embodiments and aspects described herein wherein the nucleic acid comprises the first transgene and the third transgene, the first transgene and the third transgene are inserted between the partial B14R and B29R vaccinia genes.

[0136] In some embodiments of the various embodiments and aspects described herein wherein the nucleic acid comprises the second transgene and the third transgene, the second transgene and the third transgene are inserted between the partial C2L and F3L vaccinia genes. In other embodiments of the various embodiments and aspects described herein wherein the nucleic acid comprises the second transgene and the third transgene, the second transgene and the third transgene are inserted into the locus of the deletion in the B8R gene. In other embodiments of the various embodiments and aspects described herein wherein the nucleic acid comprises the second transgene and the third transgene, the second transgene and the third transgene are inserted between the partial B14R and B29R vaccinia genes.

[0137] In some embodiments of the various embodiments and aspects described herein wherein the nucleic acid comprises the first transgene and the second transgene, the first transgene is inserted between the partial C2L and F3L vaccinia genes, and the second transgene is inserted into the locus of the deletion in the B8R gene. In other embodiments of the various embodiments and aspects described herein wherein the nucleic acid comprises the first transgene and the second transgene, the second transgene is inserted between the partial C2L and F3L vaccinia genes, and the first transgene is inserted into the locus of the deletion in the B8R gene. In other embodiments of the various embodiments and aspects described herein wherein the nucleic acid comprises the first transgene and the second transgene, the first transgene is inserted between the partial C2L and F3L vaccinia genes, and the second transgene is inserted between the partial B14R and B29R vaccinia genes. In other embodiments of the various embodiments and aspects described herein wherein the nucleic acid comprises the first transgene and the second transgene, the second transgene is inserted between the partial C2L and F3L vaccinia genes, and the first transgene is inserted between the partial B14R and B29R vaccinia genes. In other embodiments of the various embodiments and aspects described herein wherein the nucleic acid comprises the first transgene and the second transgene, the first transgene is inserted into the locus of the deletion in the B8R gene, and the second transgene is inserted between the partial B14R and B29R vaccinia genes. In other embodiments of the various embodiments and aspects described herein wherein the nucleic acid comprises the first transgene and the second transgene, the second transgene is inserted into the locus of the deletion in the B8R gene, and the first transgene is inserted between the partial B14R and B29R vaccinia genes.

[0138] In some embodiments of the various embodiments and aspects described herein wherein the nucleic acid comprises the first transgene and the third transgene, the first transgene is inserted between the partial C2L and F3L vaccinia genes, and the third transgene is inserted into the locus of the deletion in the B8R gene. In other embodiments of the various embodiments and aspects described herein wherein the nucleic acid comprises the first transgene and the third transgene, the third transgene is inserted between the partial C2L and F3L vaccinia genes, and the first transgene is inserted into the locus of the deletion in the B8R gene. In other embodiments of the various embodiments and aspects described herein wherein the nucleic acid comprises the first transgene and the third transgene, the first transgene is inserted between the partial C2L and F3L vaccinia genes, and the third transgene is inserted between the partial B14R and B29R vaccinia genes. In other embodiments of the various embodiments and aspects described herein wherein the nucleic acid comprises the first transgene and the third transgene, the third transgene is inserted between the partial C2L and F3L vaccinia genes, and the first transgene is inserted between the partial B14R and B29R vaccinia genes. In other embodiments of the various embodiments and aspects described herein wherein the nucleic acid comprises the first transgene and the third transgene, the first transgene is inserted into the locus of the deletion in the B8R gene, and the third transgene is inserted between the partial B14R and B29R vaccinia genes. In other embodiments of the various embodiments and aspects described herein wherein the nucleic acid comprises the first transgene and the third transgene, the third transgene is inserted into the locus of the deletion in the B8R gene, and the first transgene is inserted between the partial B14R and B29R vaccinia genes.

[0139] In some embodiments of the various embodiments and aspects described herein wherein the nucleic acid comprises the second transgene and the third transgene, the second transgene is inserted between the partial C2L and F3L vaccinia genes, and the third transgene is inserted into the locus of the deletion in the B8R gene. In other embodiments of the various embodiments and aspects described herein wherein the nucleic acid comprises the second transgene and the third transgene, the third transgene is inserted between the partial C2L and F3L vaccinia genes, and the second transgene is inserted into the locus of the deletion in the B8R gene. In other embodiments of the various embodiments and aspects described herein wherein the nucleic acid comprises the second transgene and the third transgene, the second transgene is inserted between the partial C2L and F3L vaccinia genes, and the third transgene is inserted between the partial B14R and B29R vaccinia genes. In other embodiments of the various embodiments and aspects described herein wherein the nucleic acid comprises the second transgene and the third transgene, the third transgene is inserted between the partial C2L and F3L vaccinia genes, and the second transgene is inserted between the partial B14R and B29R vaccinia genes. In other embodiments of the various embodiments and aspects described herein wherein the nucleic acid comprises the second transgene and the third transgene, the second transgene is inserted into the locus of the deletion in the B8R gene, and the third transgene is inserted between the partial B14R and B29R vaccinia genes. In other embodiments of the various embodiments and aspects described herein wherein the nucleic acid comprises the second transgene and the third transgene, the third transgene is inserted into the locus of the deletion in the B8R gene, and the second transgene is inserted between the partial B14R and B29R vaccinia genes.

[0140] In some embodiments of the various embodiments and aspects described herein wherein the nucleic acid comprises the first transgene, the second transgene and the third transgene, the first transgene, the second transgene, and the third transgene are inserted between the partial C2L and F3L vaccinia genes. In other embodiments of the various embodiments and aspects described herein wherein the nucleic acid comprises the first transgene, the second transgene and the third transgene, the first transgene, the second transgene, and the third transgene are inserted into the locus of the deletion in the B8R gene. In other embodiments of the various embodiments and aspects described herein wherein the nucleic acid comprises the first transgene, the second transgene and the third transgene, the first transgene, the second transgene, and the third transgene are inserted between the partial B14R and B29R vaccinia genes.

[0141] In other embodiments of the various embodiments and aspects described herein wherein the nucleic acid comprises the first transgene, the second transgene and the third transgene, the first transgene is inserted between the partial C2L and F3L vaccinia genes, and the second transgene and the third transgene are inserted into the locus of the deletion in the B8R gene. In other embodiments of the various embodiments and aspects described herein wherein the nucleic acid comprises the first transgene, the second transgene and the third transgene, the second transgene is inserted between the partial C2L and F3L vaccinia genes, and the first transgene and the third transgene are inserted into the locus of the deletion in the B8R gene. In other embodiments of the various embodiments and aspects described herein wherein the nucleic acid comprises the first transgene, the second transgene and the third transgene, the third transgene is inserted between the partial C2L and F3L vaccinia genes, and the first transgene and the second transgene are inserted into the locus of the deletion in the B8R gene. In other embodiments of the various embodiments and aspects described herein wherein the nucleic acid comprises the first transgene, the second transgene and the third transgene, the first transgene and the second transgene are inserted between the partial C2L and F3L vaccinia genes, and the third transgene is inserted into the locus of the deletion in the B8R gene. In other embodiments of the various embodiments and aspects described herein wherein the nucleic acid comprises the first transgene, the second transgene and the third transgene, the first transgene and the third transgene are inserted between the partial C2L and F3L vaccinia genes, and the second transgene is inserted into the locus of the deletion in the B8R gene. In other embodiments of the various embodiments and aspects described herein wherein the nucleic acid comprises the first transgene, the second transgene and the third transgene, the second transgene and the third transgene are inserted between the partial C2L and F3L vaccinia genes, and the first transgene is inserted into the locus of the deletion in the B8R gene. In other embodiments of the various embodiments and aspects described herein wherein the nucleic acid comprises the first transgene, the second transgene and the third transgene, the first transgene is inserted within between the partial C2L and F3L vaccinia genes, and the second transgene and the third transgene are inserted between the partial B14R and B29R vaccinia genes. In other embodiments of the various embodiments and aspects described herein wherein the nucleic acid comprises the first transgene, the second transgene and the third transgene, the second transgene is inserted between the partial C2L and F3L vaccinia genes, and the first transgene and the third transgene are inserted between the partial B14R and B29R vaccinia genes. In other embodiments of the various embodiments and aspects described herein wherein the nucleic acid comprises the first transgene, the second transgene and the third transgene, the third transgene is inserted between the partial C2L and F3L vaccinia genes, and the first transgene and the second transgene are inserted between the partial B14R and B29R vaccinia genes. In other embodiments of the various embodiments and aspects described herein wherein the nucleic acid comprises the first transgene, the second transgene and the third transgene, the first transgene and the second transgene are inserted between the partial C2L and F3L vaccinia genes, and the third transgene is inserted between the partial B14R and B29R vaccinia genes. In other embodiments of the various embodiments and aspects described herein wherein the nucleic acid comprises the first transgene, the second transgene and the third transgene, the first transgene and the third transgene are inserted between the partial C2L and F3L vaccinia genes, and the second transgene is inserted between the partial B14R and B29R vaccinia genes. In other embodiments of the various embodiments and aspects described herein wherein the nucleic acid comprises the first transgene, the second transgene and the third transgene, the second transgene and the third transgene are inserted between the partial C2L and F3L vaccinia genes, and the first transgene is inserted between the partial B14R and B29R vaccinia genes. In other embodiments of the various embodiments and aspects described herein wherein the nucleic acid comprises the first transgene, the second transgene and the third transgene, the first transgene is inserted into the locus of the deletion in the B8R gene, and the second transgene and the third transgene are inserted between the partial B14R and B29R vaccinia genes. In other embodiments of the various embodiments and aspects described herein wherein the nucleic acid comprises the first transgene, the second transgene and the third transgene, the second transgene is inserted into the locus of the deletion in the B8R gene, and the first transgene and the third transgene are inserted between the partial B14R and B29R vaccinia genes. In other embodiments of the various embodiments and aspects described herein wherein the nucleic acid comprises the first transgene, the second transgene and the third transgene, the third transgene is inserted into the locus of the deletion in the B8R gene, and the first transgene and the second transgene are inserted between the partial B14R and B29R vaccinia genes. In other embodiments of the various embodiments and aspects described herein wherein the nucleic acid comprises the first transgene, the second transgene and the third transgene, the first transgene and the second transgene are inserted into the locus of the deletion in the B8R gene, and the third transgene is inserted between the partial B14R and B29R vaccinia genes. In other embodiments of the various embodiments and aspects described herein wherein the nucleic acid comprises the first transgene, the second transgene and the third transgene, the first transgene and the third transgene are inserted into the locus of the deletion in the B8R gene, and the second transgene is inserted between the partial B14R and B29R vaccinia genes. In other embodiments of the various embodiments and aspects described herein wherein the nucleic acid comprises the first transgene, the second transgene and the third transgene, the second transgene and the third transgene are inserted into the locus of the deletion in the B8R gene, and the first transgene is inserted between the partial B14R and B29R vaccinia genes.

[0142] In other embodiments of the various embodiments and aspects described herein wherein the nucleic acid comprises the first transgene, the second transgene and the third transgene, the first transgene is inserted between the partial C2L and F3L vaccinia genes, the second transgene is inserted into the locus of the deletion in the B8R gene, and the third transgene is inserted between the partial B14R and B29R vaccinia genes. In other embodiments of the various embodiments and aspects described herein wherein the nucleic acid comprises the first transgene, the second transgene and the third transgene, the first transgene is inserted between the partial C2L and F3L vaccinia genes, the third transgene is inserted into the locus of the deletion in the B8R gene, and the second transgene is inserted between the partial B14R and B29R vaccinia genes. In other embodiments of the various embodiments and aspects described herein wherein the nucleic acid comprises the first transgene, the second transgene and the third transgene, the second transgene is inserted between the partial C2L and F3L vaccinia genes, the first transgene is inserted into the locus of the deletion in the B8R gene, and the third transgene is inserted between the partial B14R and B29R vaccinia genes. In other embodiments of the various embodiments and aspects described herein wherein the nucleic acid comprises the first transgene, the second transgene and the third transgene, the second transgene is inserted between the partial C2L and F3L vaccinia genes, the third transgene is inserted into the locus of the deletion in the B8R gene, and the first transgene is inserted between the partial B14R and B29R vaccinia genes. In other embodiments of the various embodiments and aspects described herein wherein the nucleic acid comprises the first transgene, the second transgene and the third transgene, the third transgene is inserted between the partial C2L and F3L vaccinia genes, the first transgene is inserted into the locus of the deletion in the B8R gene, and the second transgene is inserted between the partial B14R and B29R vaccinia genes. In other embodiments of the various embodiments and aspects described herein wherein the nucleic acid comprises the first transgene, the second transgene and the third transgene, the third transgene is inserted between the partial C2L and F3L vaccinia genes, the second transgene is inserted into the locus of the deletion in the B8R gene, and the first transgene is inserted between the partial B14R and B29R vaccinia genes.

[0143] In various embodiments and aspects described herein wherein the nucleic acid comprises the nucleotide sequence of SEQ ID NO: 210, the partial C2L and F3L vaccinia genes are partial C2L and F3L vaccinia genes in SEQ ID NO: 210. In various embodiments and aspects described herein wherein the nucleic acid comprises the nucleotide sequence of SEQ ID NO: 210, the partial B14R and B29R vaccinia genes are partial B14R and B29R vaccinia genes in SEQ ID NO: 210.

[0144] In one aspect, provided herein is a virus comprising the nucleic acid described herein.

[0145] In one aspect, provided are packaging cell lines comprising nucleic acids or viruses disclosed herein.

[0146] In one aspect, provided herein are pharmaceutical compositions comprising a virus disclosed herein and a physiologically acceptable carrier.

[0147] In one aspect, provided are methods of treating cancer in a mammalian patient, said method comprising administering a therapeutically effective amount of a virus as disclosed herein to said patient. In another aspect, provided are methods of treating cancer in a mammalian patient, said method comprising administering a therapeutically effective amount of a pharmaceutical composition as disclosed herein to said patient. In some embodiments, the mammalian patient is a human patient.

[0148] In some embodiments, the virus is used as a prime in a prime:boost treatment. In some embodiments, the virus is used as a boost in a prime:boost treatment.

[0149] In some embodiments, the mammalian patient has cancer. For example, in some embodiments, the cancer is selected from the group consisting of leukemia, lymphoma, liver cancer, bone cancer, lung cancer, brain cancer, bladder cancer, gastrointestinal cancer, breast cancer, cardiac cancer, cervical cancer, uterine cancer, head and neck cancer, gallbladder cancer, laryngeal cancer, lip and oral cavity cancer, ocular cancer, melanoma, pancreatic cancer, prostate cancer, colorectal cancer, testicular cancer, and throat cancer.

[0150] In some embodiments, the cancer is selected from the group consisting of acute lymphoblastic leukemia (ALL), acute myeloid leukemia (AML), chronic lymphocytic leukemia (CLL), chronic myelogenous leukemia (CML), adrenocortical carcinoma, AIDS-related lymphoma, primary CNS lymphoma, anal cancer, appendix cancer, astrocytoma, atypical teratoid/rhabdoid tumor, basal cell carcinoma, bile duct cancer, extrahepatic cancer, Ewing sarcoma family, osteosarcoma and malignant fibrous histiocytoma, central nervous system embryonal tumors, central nervous system germ cell tumors, craniopharyngioma, ependymoma, bronchial tumors, Burkitt lymphoma, carcinoid tumor, primary lymphoma, chordoma, chronic myeloproliferative neoplasms, colon cancer, extrahepatic bile duct cancer, ductal carcinoma in situ (DCIS), endometrial cancer, ependymoma, esophageal cancer, esthesioneuroblastoma, extracranial germ cell tumor, extragonadal germ cell tumor, fallopian tube cancer, fibrous histiocytoma of bone, gastrointestinal carcinoid tumor, gastrointestinal stromal tumors (GIST), testicular germ cell tumor, gestational trophoblastic disease, glioma, childhood brain stem glioma, hairy cell leukemia, hepatocellular cancer, Langerhans cell histiocytosis, Hodgkin lymphoma, hypopharyngeal cancer, islet cell tumors, pancreatic neuroendocrine tumors, Wilms tumor and other childhood kidney tumors, Langerhans cell histiocytosis, small cell lung cancer, cutaneous T cell lymphoma, intraocular melanoma, Merkel cell carcinoma, mesothelioma, metastatic squamous neck cancer, midline tract carcinoma, multiple endocrine neoplasia syndromes, multiple myeloma/plasma cell neoplasm, myelodysplastic syndromes, nasal cavity and paranasal sinus cancer, nasopharyngeal cancer, neuroblastoma, non-Hodgkin's lymphoma (NHL), non-small cell lung cancer (NSCLC), epithelial ovarian cancer, germ cell ovarian cancer, low malignant potential ovarian cancer, pancreatic neuroendocrine tumors, papillomatosis, paraganglioma, paranasal sinus and nasal cavity cancer, parathyroid cancer, penile cancer, pharyngeal cancer, pheochromocytoma, pituitary tumor, pleuropulmonary blastoma, primary peritoneal cancer, rectal cancer, retinoblastoma, rhabdomyosarcoma, salivary gland cancer, Kaposi's sarcoma, rhabdomyosarcoma, Sézary syndrome, small intestine cancer, soft tissue sarcoma, throat cancer, thymoma and thymic carcinoma, thyroid cancer, transitional cell cancer of the renal pelvis and ureter, urethral cancer, endometrial uterine cancer, uterine sarcoma, vaginal cancer, vulvar cancer, and Waldenstrom macroglobulinemia.

[0151] In some embodiments, provided methods further comprise administering to said patient an immune checkpoint inhibitor. In some embodiments, the immune checkpoint inhibitor is selected from the group consisting of OX40 ligand, ICOS ligand, anti-CD47 antibody or antigen-binding fragment thereof, anti-CD40/CD40L antibody or antigen-binding fragment thereof, anti-Lag3 antibody or antigen-binding fragment thereof, anti-CTLA-4 antibody or antigen-binding fragment thereof, anti-PD-L1 antibody or antigen-binding fragment thereof, anti-PD1 antibody or antigen-binding fragment thereof, and anti-Tim-3 antibody or antigen-binding fragment thereof. In some embodiments, the immune checkpoint inhibitor is an anti-PD1 antibody or antigen-binding fragment thereof or an anti-CTLA-4 antibody or antigen-binding fragment thereof. In some embodiments, the immune checkpoint inhibitor is an anti-PD1 antibody or antigen-binding fragment thereof. In some embodiments, the immune checkpoint inhibitor is an anti-PD-L1 antibody or antigen-binding fragment thereof. In some embodiments, the immune checkpoint inhibitor is an anti-PD1 or anti-PD-L1 antibody or antigen-binding fragment thereof. In some embodiments, the immune checkpoint inhibitor is an anti-CTLA-4 antibody or antigen-binding fragment thereof.

[0152] In some embodiments, provided methods further comprise administering to said patient an interleukin.

[0153] In some embodiments, said interleukin is selected from the group consisting of IL-1 alpha, IL-1 beta, IL-2, IL-4, IL-7, IL-10, IL-12 p35, IL-12 p40, IL-12 p70, IL-15, IL-18, IL-21, and IL-23. In some embodiments, the interleukin is selected from the group consisting of IL-12 p35, IL-12 p40, and IL-12 p70. In some embodiments, the interleukin is membrane-bound.

[0154] In some embodiments, the method further comprises administering to said patient an interferon. In some embodiments, the interferon is selected from the group consisting of IFN-alpha, IFN-beta, IFN-delta, IFN-epsilon, IFN-tau, IFN-omega, IFN-zeta, and IFN-gamma.

[0155] In some embodiments, provided methods further comprises administering to said patient a cytokine. In some embodiments, the cytokine is a TNF superfamily member protein. In some embodiments, the TNF superfamily member protein is selected from the group consisting of TRAIL, Fas ligand, LIGHT (TNFSF-14), TNF-alpha, and 4-1BB ligand. In some embodiments, the cytokine is selected from the group consisting of GM-CSF, Flt3 ligand, CD40 ligand, TGF-beta, VEGF-R2, and cKit. In some embodiments, the cytokine is Flt3 ligand.

[0156] In one aspect, provided are kits comprising a nucleic acid or virus as disclosed herein and a package insert instructing a user of said kit to express said nucleic acid or said virus in a host cell.

[0157] In one aspect, provided are kits comprising a virus as disclosed herein and a package insert instructing a user to administer a therapeutically effective amount of said virus to a mammalian patient having cancer, thereby treating said cancer. In some embodiments, the mammalian patient is a human patient.

### 3.1. Definitions

[0158] As used herein, the term “about” refers to a value that is no more than 10% above or below the value being described. For example, the term “about 5 nM” indicates a range of from 4.5 nM to 5.5 nM.

[0159] As used herein, the term “antibody” (Ab) refers to an immunoglobulin molecule that specifically binds to, or is immunologically reactive with, a particular antigen, and includes polyclonal, monoclonal, genetically engineered and otherwise modified forms of antibodies, including but not limited to chimeric antibodies, humanized antibodies, heteroconjugate antibodies (e.g., bi- tri- and quad-specific antibodies, diabodies, triabodies, and tetrabodies), and antigen-binding fragments of antibodies, including e.g., Fab′, F(ab′)2, Fab, Fv, rIgG, and scFv fragments. Moreover, unless otherwise indicated, the term “monoclonal antibody” (mAb) is meant to include both intact molecules, as well as, antibody fragments (such as, for example, Fab and F(ab′)2 fragments) that are capable of specifically binding to a target protein. Fab and F(ab′)2 fragments lack the Fc fragment of an intact antibody, clear more rapidly from the circulation of the animal, and may have less non-specific tissue binding than an intact antibody (see Wahl et al., J. Nucl. Med. 24:31 6, 1 983; incorporated herein by reference).

[0160] The term “antigen-binding fragment,” as used herein, refers to one or more fragments of an antibody that retain the ability to specifically bind to a target antigen. The antigen-binding function of an antibody can be performed by fragments of a full-length antibody. The antibody fragments can be a Fab, F(ab′)2, scFv, SMIP, diabody, a triabody, an affibody, a nanobody, an aptamer, or a domain antibody. Examples of binding fragments encompassed of the term “antigen-binding fragment” of an antibody include, but are not limited to: (i) a Fab fragment, a monovalent fragment consisting of the V_{L}, VH, C_{L}, and C_{H}1 domains; (ii) a F(ab′)2 fragment, a bivalent fragment comprising two Fab fragments linked by a disulfide bridge at the hinge region; (iii) a Fd fragment consisting of the VH and C_{H}1 domains; (iv) a Fv fragment consisting of the VL and VH domains of a single arm of an antibody, (v) a dAb including VH and VL domains; (vi) a dAb fragment (Ward et al., Nature 341:544-546, 1 989), which consists of a VH domain; (vii) a dAb which consists of a VH or a VL domain; (viii) an isolated complementarity determining region (CDR); and (ix) a combination of two or more isolated CDRs which may optionally be joined by a synthetic linker. Furthermore, although the two domains of the Fv fragment, VL and VH, are coded for by separate genes, they can be joined, using recombinant methods, by a linker that enables them to be made as a single protein chain in which the VL and VH regions pair to form monovalent molecules (known as single-chain Fv (scFv); see, e.g., Bird et al., Science 242:423-426, 1988, and Huston et al., Proc. Natl. Acad. Sci. USA 85:5879-5883, 1988). These antibody fragments can be obtained using conventional techniques known to those of skill in the art, and the fragments can be screened for utility in the same manner as intact antibodies. Antigen-binding fragments can be produced by recombinant DNA techniques, enzymatic or chemical cleavage of intact immunoglobulins, or, in some embodiments, by chemical peptide synthesis procedures known in the art.

[0161] As used herein, the term “bispecific antibodies” refers to monoclonal, often human or humanized antibodies that have binding specificities for at least two different antigens.

[0162] As used herein, the terms “cell,” “cell line,” and “cell culture” may be used interchangeably. All of these terms also include their progeny, which is any and all subsequent generations. It is understood that all progeny may not be identical due to deliberate or inadvertent mutations.

[0163] As used herein, the term “chimeric” antibody refers to an antibody having variable sequences derived from an immunoglobulin of one source organism, such as rat or mouse, and constant regions derived from an immunoglobulin of a different organism (e.g., a human). Methods for producing chimeric antibodies are known in the art. See, e.g., Morrison, 1985, Science 229(4719): 1202-7; Oi et al., 1986, BioTechniques 4:214-221; Gillies et al., 1985, J. Immunol. Methods 125:191 -202; U.S. Pat. Nos. 5,807,715; 4,816,567; and 4,816,397; incorporated herein by reference.

[0164] As used herein, the term “complementarity determining region” (CDR) refers to a hypervariable region found both in the light chain and the heavy chain variable domains. The more highly conserved portions of variable domains are called the framework regions (FRs). As is appreciated in the art, the amino acid positions that delineate a hypervariable region of an antibody can vary, depending on the context and the various definitions known in the art. Some positions within a variable domain may be viewed as hybrid hypervariable positions in that these positions can be deemed to be within a hypervariable region under one set of criteria while being deemed to be outside a hypervariable region under a different set of criteria. One or more of these positions can also be found in extended hypervariable regions. The variable domains of native heavy and light chains each comprise four framework regions that primarily adopt a (3-sheet configuration, connected by three CDRs, which form loops that connect, and in some cases form part of, the (3-sheet structure. The CDRs in each chain are held together in close proximity by the FR regions in the order FR1-CDR1-FR2-CDR2-FR3-CDR3-FR4 and, with the CDRs from the other antibody chains, contribute to the formation of the target binding site of antibodies (see Kabat et al., Sequences of Proteins of Immunological Interest (National Institute of Health, Bethesda, Md. 1987; incorporated herein by reference).

[0165] As used herein, numbering of immunoglobulin amino acid residues is done according to the immunoglobulin amino acid residue numbering system of Kabat et al., unless otherwise indicated.

[0166] As used herein, the terms “conservative mutation,” “conservative substitution,” or “conservative amino acid substitution” refer to a substitution of one or more amino acids for one or more different amino acids that exhibit similar physicochemical properties, such as polarity, electrostatic charge, and steric volume. These properties are summarized for each of the twenty naturally-occurring amino acids in Table 1 below. From this table it is appreciated that the conservative amino acid families include (i) G, A, V, L and I; (ii) D and E; (iii) C, Sand T; (iv) H, K and R; (v) N and Q; and (vi) F, Y and W. A conservative mutation or substitution is therefore one that substitutes one amino acid for a member of the same amino acid family (e.g., a substitution of Ser for Thr or Lys for Arg).

TABLE 1
Representative physicochemical properties of
naturally occurring amino acids

| | | | | Electrostatic | |
|---|---|---|---|---|---|
| | 3 | 1 | Side- | character at | |
| Amino | Letter | Letter | chain | physiological | Steric |
| Acid | Code | Code | Polarity | pH (7.4) | Volume^{†} |
| Alanine | Ala | A | non- | neutral | small |
| | | | polar | | |
| Arginine | Arg | R | polar | cationic | large |
| Asparagine | Asn | N | polar | neutral | intermediate |
| Aspartic | Asp | D | polar | anionic | intermediate |
| acid | | | | | |
| Cysteine | Cys | C | non- | neutral | intermediate |
| | | | polar | | |
| Glutamic | Glu | E | polar | anionic | intermediate |
| acid | | | | | |
| Glutamine | Gln | Q | polar | neutral | intermediate |
| Glycine | Gly | G | non- | neutral | small |
| | | | polar | | |
| Histidine | His | H | polar | Both neutral | large |
| | | | | and cationic | |
| | | | | forms in | |
| | | | | equilibrium | |
| | | | | at pH 7.4 | |
| Isoleucine | Ile | I | non- | neutral | large |
| | | | polar | | |
| Leucine | Leu | L | non- | neutral | large |
| | | | polar | | |
| Lysine | Lys | K | polar | cationic | large |
| Methionine | Met | M | non- | neutral | large |
| | | | polar | | |
| Phenyl- | Phe | F | non- | neutral | large |
| alanine | | | polar | | |
| Proline | Pro | P | non- | neutral | intermediate |
| | | | polar | | |
| Serine | Ser | S | polar | neutral | small |
| Threonine | Thr | T | polar | neutral | intermediate |
| Tryptophan | Trp | W | non- | neutral | bulky |
| | | | polar | | |
| Tyrosine | Tyr | Y | polar | neutral | large |
| Valine | Val | V | non- | neutral | intermediate |
| | | | polar | | |

^{†}based on volume in A³: 50-100 is small, 100-150 is intermediate, 150-200 is large, and >200 is bulky

[0167] As used herein, the terms “delete,” “deletion,” and the like refer to modifications to a gene or a regulatory element associated therewith or operatively linked thereto (e.g., a transcription factor-binding site, such as a promoter or enhancer element) that remove the gene or otherwise render the gene nonfunctional. Exemplary deletions, as described herein, include the removal of the entirety of a nucleic acid encoding a gene of interest, from the start codon to the stop codon of the target gene. Other examples of deletions as described herein include the removal of a portion of the nucleic acid encoding the target gene (e.g., one or more codons, or a portion thereof, such as a single nucleotide deletion) such that, upon expression of the partially-deleted target gene, the product (e.g., RNA transcript, protein product, or regulatory RNA) is nonfunctional or less functional then a wild-type form of the target gene. Exemplary deletions as described herein include the removal of all or a portion of the regulatory element(s) associated with a gene of interest, such as all or a portion of the promoter and/or enhancer nucleic acids that regulate expression of the target gene.

[0168] In specific embodiments, the recombinant vaccinia virus genome described in this disclosure comprises deletions in one or more of the following genes: C2L, C1L, N1L, N2L, M1L, M2L, K1L, K2L, K3L, K4L, K5L, K6L, K7R, F1L, F2L, F3L, B8R, B14R, B15R, B16R, B17L, B18R, B19R, B20R, B21R (in 3′ ITR), B22R (in 3′ ITR), B23R (in 3′ ITR), B24R (in 3′ ITR), B25R (in 3′ ITR), B26R (in 3′ ITR), B27R (in 3′ ITR), B28R (in 3′ ITR), and B29R (in 3′ ITR). In a specific embodiment, the recombinant vaccinia virus genome described in this disclosure comprises deletions in the following genes: C2L, C1L, N1L, N2L, M1L, M2L, K1L, K2L, K3L, K4L, K5L, K6L, K7R, F1L, F2L, F3L, B8R, B14R, B15R, B16R, B17L, B18R, B19R, and B20R; and deletions in the following genes in the 3′ ITR: B21R, B22R, B23R, B24R, B25R, B26R, B27R, B28R, and B29R. In specific embodiments, the recombinant vaccinia virus genome described in this disclosure comprises deletions in one or more of the following genes: C2L, C1L, N1L, N2L, M1L, M2L, K1L, K2L, K3L, K4L, K5L, K6L, K7R, F1L, F2L, F3L, B14R, B15R, B16R, B17L, B18R, B19R, B20R, B20R, B21R (in 3′ ITR), B22R (in 3′ ITR), B23R (in 3′ ITR), B24R (in 3′ ITR), B25R (in 3′ ITR), B26R (in 3′ ITR), B27R (in 3′ ITR), B28R (in 3′ ITR), and B29R (in 3′ ITR), and also comprises a deletion in the B8R gene.

[0169] In some embodiments, a gene deletion removes the entire sequence of the gene. In other embodiments, a gene deletion is a partial deletion, that is, one that removes part of the sequence of the gene. In one embodiment, a gene deletion is a partial deletion that removes at least 30%, at least 40%, at least 50%, at least 60%, at least 70%, at least 80%, at least 90% or at least 95% of the sequence of the gene. In one embodiment, a gene deletion is a partial deletion that removes at least 30%, at least 40%, at least 50%, at least 60%, at least 70%, at least 80%, or at least 90% of the protein coding sequence of the gene. In other embodiments, a gene deletion removes 100% of the sequence of the gene. In yet other embodiments, a gene deletion removes 100% of the protein coding sequence of the gene. In one embodiment, a gene deletion removes at least 50, at least 100, at least 200, at least 300, at least 400, at least 500, at least 600, at least 700, at least 800, at least 900, or at least 1000 nucleotides of the sequence of the gene. In another embodiment, a gene deletion is a partial deletion that removes at least 50, at least 100, at least 200, at least 300, at least 400, at least 500, at least 600, at least 700, at least 800, at least 900, or at least 1000 nucleotides of the sequence of the gene. In a specific embodiment, a partial deletion in a gene results in a partial gene.

[0170] As used herein, the term “derivatized antibodies” refers to antibodies that are modified by a chemical reaction so as to cleave residues or add chemical moieties not native to an isolated antibody. Derivatized antibodies can be obtained by glycosylation, acetylation, pegylation, phosphorylation, amidation, derivatization by addition of known chemical protecting/blocking groups, proteolytic cleavage, linkage to a cellular ligand or other protein. Any of a variety of chemical modifications can be carried out by known techniques, including, without limitation, specific chemical cleavage, acetylation, formylation, metabolic synthesis of tunicamycin, etc. using established procedures. Additionally, the derivative can contain one or more non-natural amino acids, e.g., using amber suppression technology (see, e.g., U.S. Pat. No. 6,964,859; incorporated herein by reference).

[0171] As used herein, the term “diabodies” refers to bivalent antibodies comprising two polypeptide chains, in which each polypeptide chain includes VH and VL domains joined by a linker that is too short (e.g., a linker composed of five amino acids) to allow for intramolecular association of VH and VL domains on the same peptide chain. This configuration forces each domain to pair with a complementary domain on another polypeptide chain so as to form a homodimeric structure. Accordingly, the term “triabodies” refers to trivalent antibodies comprising three peptide chains, each of which contains one VH domain and one VL domain joined by a linker that is exceedingly short (e.g., a linker composed of 1-2 amino acids) to permit intramolecular association of VH and VL domains within the same peptide chain. In order to fold into their native structure, peptides configured in this way typically trimerize so as to position the VH and VL domains of neighboring peptide chains spatially proximal to one another to permit proper folding (see Holliger et al., Proc. Natl. Acad. Sci. USA 90:6444-48, 1993; incorporated herein by reference). As used herein, a “dual variable domain immunoglobulin” (“DVD-Ig”) refers to an

[0172] antibody that combines the target-binding variable domains of two monoclonal antibodies via linkers to create a tetravalent, dual-targeting single agent. (Gu et al., Meth. Enzymol., 502:25-41, 2012; incorporated by reference herein).

[0173] As used herein, the term “endogenous” describes a molecule (e.g., a polypeptide, nucleic acid, or cofactor) that is found naturally in a particular organism (e.g., a human) or in a particular location within an organism (e.g., an organ, a tissue, or a cell, such as a human cell).

[0174] As used herein, the term “exogenous” describes a molecule (e.g., a polypeptide, nucleic acid, or cofactor) that is not found naturally in a particular organism (e.g., a human) or in a particular location within an organism (e.g., an organ, a tissue, or a cell, such as a human cell). Exogenous materials include those that are provided from an external source to an organism or to cultured matter extracted there from.

[0175] As used herein, the term “framework region” or “FW region” includes amino acid residues that are adjacent to the CDRs. FW region residues may be present in, for example, human antibodies, rodent-derived antibodies (e.g., murine antibodies), humanized antibodies, primatized antibodies, chimeric antibodies, antibody fragments (e.g., Fab fragments), single-chain antibody fragments (e.g., scFv fragments), antibody domains, and bispecific antibodies, among others.

[0176] As used herein, the term “heterospecific antibodies” refers to monoclonal, preferably human or humanized, antibodies that have binding specificities for at least two different antigens. Traditionally, the recombinant production of heterospecific antibodies is based on the co-expression of two immunoglobulin heavy chain-light chain pairs, where the two heavy chains have different specificities (Milstein et al., Nature 305:537, 1 983). Similar procedures are disclosed, e.g., in WO 93/08829, U.S. Pat. Nos. 6,210,668; 6,193,967; 6,132,992; 6,106,833; 6,060,285; 6,037,453; 6,010,902; 5,989,530; 5,959,084; 5,959,083; 5,932,448; 5,833,985; 5,821,333; 5,807,706; 5,643,759, 5,601,819; 5,582,996, 5,496,549, 4,676,980, WO 91/00360, WO 92/00373, EP 03089, Traunecker et al., EMBO J. 10:3655 (1991), Suresh et al., Methods in Enzymology 121:210 (1986); incorporated herein by reference. Heterospecific antibodies can include Fc mutations that enforce correct chain association in multi-specific antibodies, as described by Klein et al., mAbs 4(6):653-663, 2012; incorporated herein by reference.

[0177] As used herein, the term “human antibody” refers to an antibody in which substantially every part of the protein (e.g., CDR, framework, C_{L}, C_{H} domains (e.g., C_{H}1, C_{H}2, C_{H}3), hinge, (V_{L}, V_{H})) is substantially non-immunogenic in humans, with only minor sequence changes or variations. A human antibody can be produced in a human cell (e.g., by recombinant expression), or by a non-human animal or a prokaryotic or eukaryotic cell that is capable of expressing functionally rearranged human immunoglobulin (e.g., heavy chain and/or light chain) genes. Further, when a human antibody is a single-chain antibody, it can include a linker peptide that is not found in native human antibodies. For example, an Fv can comprise a linker peptide, such as two to about eight glycine or other amino acid residues, which connects the variable region of the heavy chain and the variable region of the light chain. Such linker peptides are considered to be of human origin. Human antibodies can be made by a variety of methods known in the art including phage display methods using antibody libraries derived from human immunoglobulin sequences. See U.S. Pat. Nos. 4,444,887 and 4,716,111; and PCT publications WO 1998/46645; WO 1998/50433; WO 1998/24893; WO 1998/16654; WO 1996/34096; WO 1996/33735; and WO 1991/10741; incorporated herein by reference. Human antibodies can also be produced using transgenic mice that are incapable of expressing functional endogenous immunoglobulins, but which can express human immunoglobulin genes. See, e.g., PCT publications WO 98/24893; WO 92/01047; WO 96/34096; WO 96/33735; U.S. Pat. Nos. 5,413,923; 5,625, 126; 5,633,425; 5,569,825; 5,661,016; 5,545,806; 5,814,318; 5,885,793; 5,916,771; and 5,939,598; incorporated by reference herein.

[0178] As used herein, the term “humanized” antibodies refers to forms of non-human (e.g., murine) antibodies that are chimeric immunoglobulins, immunoglobulin chains or fragments thereof (such as Fv, Fab, Fab′, F(ab′)2 or other target-binding subdomains of antibodies) which contain minimal sequences derived from non-human immunoglobulin. In general, the humanized antibody will comprise substantially all of at least one, and typically two, variable domains, in which all or substantially all of the CDR regions correspond to those of a non-human immunoglobulin. All or substantially all of the FR regions may also be those of a human immunoglobulin sequence. The humanized antibody can also comprise at least a portion of an immunoglobulin constant region (Fc), typically that of a human immunoglobulin consensus sequence. Methods of antibody humanization are known in the art. See, e.g., Riechmann et al., Nature 332:323-7, 1988; U.S. Pat. Nos.: 5,530,101; 5,585,089; 5,693,761; 5,693,762; and 6,180,370 to Queen et al; EP239400; PCT publication WO 91/09967; U.S. Pat. No. 5,225,539; EP592106; and EP519596; incorporated herein by reference.

[0179] As used herein, the term “monoclonal antibody” refers to an antibody that is derived from a single clone, including any eukaryotic, prokaryotic, or phage clone, and not the method by which it is produced.

[0180] As used herein, the term “multi-specific antibodies” refers to antibodies that exhibit affinity for more than one target antigen. Multi-specific antibodies can have structures similar to full immunoglobulin molecules and include Fc regions, for example IgG Fc regions. Such structures can include, but not limited to, IgG-Fv, IgG-(scFv)2, DVD-Ig, (scFv)2-(scFv)2-Fc and (scFv)2-Fc-(scFv)2. In case of IgG-(scFv)2, the scFv can be attached to either the N-terminal or the C-terminal end of either the heavy chain or the light chain. Exemplary multi-specific molecules have been reviewed by Kontermann, 2012, mAbs 4(2):182-197, Yazaki et al., 2013, Protein Engineering, Design & Selection 26(3):1 87-1 93, and Grote et al., 2012, in Proetzel & Ebersbach (eds.), Antibody Methods and Protocols, Methods in Molecular Biology vol. 901, chapter 16:247-263; incorporated herein by reference. Exemplary multi-specific molecules that lack Fc regions and into which antibodies or antibody fragments can be incorporated include scFv dimers (diabodies), trimers (triabodies) and tetramers (tetrabodies), Fab dimers (conjugates by adhesive polypeptide or protein domains) and Fab trimers (chemically conjugated), are described by Hudson and Souriau, 2003, Nature Medicine 9:129-134; incorporated herein by reference.

[0181] As used herein, the term “percent(%) sequence identity” refers to the percentage of amino acid (or nucleic acid) residues of a candidate sequence that are identical to the amino acid (or nucleic acid) residues of a reference sequence after aligning the sequences and introducing gaps, if necessary, to achieve the maximum percent sequence identity (e.g., gaps can be introduced in one or both of the candidate and reference sequences for optimal alignment and non-homologous sequences can be disregarded for comparison purposes). Alignment for purposes of determining percent sequence identity can be achieved in various ways that are within the skill in the art, for instance, using publicly available computer software, such as BLAST, ALIGN, or Megalign (ONASTAR) software. Those skilled in the art can determine appropriate parameters for measuring alignment, including any algorithms needed to achieve maximal alignment over the full length of the sequences being compared. For example, a reference sequence aligned for comparison with a candidate sequence may show that the candidate sequence exhibits from 50% to 100% sequence identity across the full length of the candidate sequence or a selected portion of contiguous amino acid (or nucleic acid) residues of the candidate sequence. The length of the candidate sequence aligned for comparison purposes may be, for example, at least 30%, (e.g., 30%, 40, 50%, 60%, 70%, 80%, 90%, or 100%) of the length of the reference sequence. When a position in the candidate sequence is occupied by the same amino acid residue as the corresponding position in the reference sequence, then the molecules are identical at that position.

[0182] As used herein, the term “primatized antibody” refers to an antibody comprising framework regions from primate-derived antibodies and other regions, such as CDRs and constant regions, from antibodies of a non-primate source. Methods for producing primatized antibodies are known in the art. See e.g., U.S. Pat. Nos. 5,658,570; 5,681,722; and 5,693,780; incorporated herein by reference.

[0183] As used herein, the term “operatively linked” in the context of a polynucleotide fragment is intended to mean that the two polynucleotide fragments are joined such that the amino acid sequences encoded by the two polynucleotide fragments remain in-frame.

[0184] As used herein, the terms “regulatory element” and the like refer to promoters, enhancers, and other expression control elements (e.g., polyadenylation signals) that control the transcription or translation of the antibody chain genes. Such regulatory sequences are described, for example, in Goeddel, Gene Expression Technology: Methods in Enzymology 185 (Academic Press, San Diego, Calif., 1990); incorporated herein by reference. As used herein, the terms “subject” and “patient” refer to an organism that receives treatment for a particular disease or condition as described herein (such as cancer or an infectious disease). Examples of subjects and patients include mammals, such as humans, receiving treatment for diseases or conditions, for example, cell proliferation disorders, such as cancer.

[0185] As used herein, the term “scFv” refers to a single-chain Fv antibody in which the variable domains of the heavy chain and the light chain from an antibody have been joined to form one chain. scFv fragments contain a single polypeptide chain that includes the variable region of an antibody light chain (VL) (e.g., CDR-L1, CDR-L2, and/or CDR-L3) and the variable region of an antibody heavy chain (V_{H}) (e.g., CDR-H1, CDR-H2, and/or CDR-H3) separated by a linker. The linker that joins the VL and VH regions of a scFv fragment can be a peptide linker composed of proteinogenic amino acids. Alternative linkers can be used to so as to increase the resistance of the scFv fragment to proteolytic degradation (e.g., linkers containing D-amino acids), in order to enhance the solubility of the scFv fragment (e.g., hydrophilic linkers such as polyethylene glycol-containing linkers or polypeptides containing repeating glycine and serine residues), to improve the biophysical stability of the molecule (e.g., a linker containing cysteine residues that form intramolecular or intermolecular disulfide bonds), or to attenuate the immunogenicity of the scFv fragment (e.g., linkers containing glycosylation sites). scFv molecules are known in the art and are described, e.g., in U.S. Pat. No. 5,892,019, Flo et al., (Gene 77:51, 1989); Bird et al., (Science 242:423, 1988); Pantoliano et al., (Biochemistry 30:10117, 1991); Milenic et al., (Cancer Research 51:6363, 1991); and Takkinen et al., (Protein Engineering 4:837, 1991). The VL and VH domains of a scFv molecule can be derived from one or more antibody molecules. It will also be understood by one of ordinary skill in the art that the variable regions of the scFv molecules of the invention can be modified such that they vary in amino acid sequence from the antibody molecule from which they were derived. For example, in some embodiments, nucleotide or amino acid substitutions leading to conservative substitutions or changes at amino acid residues can be made (e.g., in CDR and/or framework residues). Alternatively or in addition, mutations are made to CDR amino acid residues to optimize antigen binding using art recognized techniques. scFv fragments are described, for example, in WO 2011/084714; incorporated herein by reference.

[0186] As used herein, the phrase “specifically binds” refers to a binding reaction which is determinative of the presence of an antigen in a heterogeneous population of proteins and other biological molecules that is recognized, e.g., by an antibody or antigen-binding fragment thereof, with particularity. An antibody or antigen-binding fragment thereof that specifically binds to an antigen may bind to the antigen with a KD of less than 100 nM. For example, an antibody or antigen-binding fragment thereof that specifically binds to an antigen may bind to the antigen with a KD of up to 100 nM (e.g., between 1 pM and 100 nM). An antibody or antigen-binding fragment thereof that does not exhibit specific binding to a particular antigen or epitope thereof may exhibit a KD of greater than 100 nM (e.g., greater than 500 nm, 1 μM, 100 μM, 500 μM, or 1 mM) for that particular antigen or epitope thereof. A variety of immunoassay formats may be used to select antibodies specifically immunoreactive with a particular protein or carbohydrate. For example, solid-phase ELISA immunoassays are routinely used to select antibodies specifically immunoreactive with a protein or carbohydrate. See Harlow & Lane, Antibodies, A Laboratory Manual, Cold Spring Harbor Press, New York (1988) and Harlow & Lane, Using Antibodies, A Laboratory Manual, Cold Spring Harbor Press, New York (1999), for a description of immunoassay formats and conditions that can be used to determine specific immunoreactivity.

[0187] As used herein, the term “transfection” refers to any of a wide variety of techniques commonly used for the introduction of exogenous DNA into a prokaryotic or eukaryotic host cell, e.g., electroporation, lipofection, calcium-phosphate precipitation, DEAE-dextran transfection and the like.

[0188] As used herein, the terms “treat” or “treatment” refer to therapeutic treatment, in which the object is to prevent or slow down (lessen) an undesired physiological change or disorder, such as the progression of a cell proliferation disorder, such as cancer. Beneficial or desired clinical results include, but are not limited to, alleviation of symptoms, diminishment of extent of disease, stabilized (i.e., not worsening) state of disease, delay or slowing of disease progression, amelioration or palliation of the disease state, and remission (whether partial or total), whether detectable or undetectable. Those in need of treatment include those already with the condition or disorder, as well as those prone to have the condition or disorder or those in which the condition or disorder is to be prevented.

[0189] As used herein, the term “vector” refers to a nucleic acid vector, e.g., a DNA vector, such as a plasmid, a RNA vector, virus or other suitable replicon (e.g., viral vector). A variety of vectors have been developed for the delivery of polynucleotides encoding exogenous proteins into a prokaryotic or eukaryotic cell. Examples of such expression vectors are disclosed in, e.g., WO 1994/1 1026; incorporated herein by reference. Expression vectors of the invention may contain one or more additional sequence elements used for the expression of proteins and/or the integration of these polynucleotide sequences into the genome of a host cell, such as a mammalian cell (e.g., a human cell). Exemplary vectors that can be used for the expression of antibodies and antibody fragments described herein include plasmids that contain regulatory sequences, such as promoter and enhancer regions, which direct gene transcription. Vectors may contain nucleic acids that modulate the rate of translation of a target gene or that improve the stability or nuclear export of the mRNA that results from gene transcription. These sequence elements may include, e.g., 5′ and 3′ untranslated regions, an internal ribosomal entry site (IRES), and polyadenylation signal site in order to direct efficient transcription of the gene carried on the expression vector. The vectors described herein may also contain a polynucleotide encoding a marker for selection of cells that contain such a vector. Examples of a suitable marker include genes that encode resistance to antibiotics, such as ampicillin, chloramphenicol, kanamycin, or nourseothricin. As used herein, the term “VH” refers to the variable region of an immunoglobulin heavy chain of an antibody, including the heavy chain of an Fv, scFv, or Fab. References to “VL” refer to the variable region of an immunoglobulin light chain, including the light chain of an Fv, scFv, dsFv or Fab. Antibodies (Abs) and immunoglobulins (Igs) are glycoproteins having the same structural characteristics. While antibodies exhibit binding specificity to a specific target, immunoglobulins include both antibodies and other antibody-like molecules which lack target specificity. Native antibodies and immunoglobulins are usually heterotetrameric glycoproteins of about 150,000 Daltons, composed of two identical light (L) chains and two identical heavy (H) chains. Each heavy chain of a native antibody has at the amino terminus a variable domain (V_{H}) followed by a number of constant domains. Each light chain of a native antibody has a variable domain at the amino terminus (VL) and a constant domain at the carboxy terminus.

### 3.2. Gene Definitions

[0190] As used herein, “B8R” refers to an orthopoxvirus (e.g., vaccinia, e.g., Copenhagen) gene, such as a gene that encodes a secreted protein with homology to the gamma interferon (IFN-γ) receptor. A nonlimiting example of a protein sequence encoded by an exemplary B8R gene in a Copenhagen strain of the vaccinia virus is given in UniProtKB database entry P21004 and is reproduced below:

(SEQ ID NO: 1)
MRYIIILAVLFINSIHAKITSYKFESVNFDSKIEWTGDGLYNISLKNYGIK
TWQTMYTNVPEGTYDISAFPKNDFVSFWVKFEQGDYKVEEYCTGLCVEVKI
GPPTVTLTEYDDHINLYIEHPYATRGSKKIPIYKRGDMCDIYLLYTANFTF
GDSEEPVTYDIDDYDCTSTGCSIDFATTEKVCVTAQGATEGFLEKITPWSS
EVCLTPKKNVYTCAIRSKEDVPNFKDKMARVIKRKFNKQSQSYLTKFLGST
SNDVTTFLSMLNLTKYS.

[0191] The term “B8R” may also include fragments or variants of the protein listed above, or of homologous genes from another vaccinia virus strain. Variants include, without limitation, those sequences having 85 percent or greater identity to the sequences disclosed herein.

[0192] As used herein, “B14R” refers to an orthopoxvirus (e.g., vaccinia, e.g., Copenhagen) gene. An example of a protein sequence encoded by an exemplary B14R gene in a Copenhagen strain of the vaccinia virus is given in UniProtKB database entry P20842 and is reproduced below:

(SEQ ID NO: 2)
MNHCLLAISAVYFKAKWLTPFEKEFTSDYPFYVSPTEMVDVSMMSMYGELF
NHASVKESFGNFSIIELPYVGDTSMMVILPDKIDGLESIEQNLTDTNFKKW
CNSLDAMFIDVHIPKFKVTGSYNLVDTLVKSGLTEVFGSTGDYSNMCNLDV
SVDAMIHKTYIDVNEEYTEAAAATCALVSDCASTITNEFCVDHPFIYVIRH
VDGKILFVGRYCSPTTNC.

[0193] As used herein, “B15R” refers to an orthopoxvirus (e.g., vaccinia, e.g., Copenhagen) gene. An example of a protein sequence encoded by an exemplary B15R gene in a Copenhagen strain of the vaccinia virus is given in UniProtKB database entry P21089 and is reproduced below:

(SEQ ID NO: 3)
MTANFSTHVFSPQHCGCDRLTSIDDVKQCLTEYIYWSSYAYRNRQCAGQLY
STLLSFRDDAELVFIDIRELVKNMPWDDVKDCTEIIRCYIPDEQKTIREIS
AIIGLCAYAATYWGGEDHPTSNSLNALFVMLEMLNYVDYNIIFRRMN.

[0194] As used herein, “B16R” refers to an orthopoxvirus (e.g., vaccinia, e.g., Copenhagen) gene, such as a gene that encodes a IL-1-beta inhibitor. An example of a protein sequence encoded by an exemplary B16R gene in a Copenhagen strain of the vaccinia virus is given in UniProtKB database entry P21116 and is reproduced below: MSILPVIFLP IFFYSSFVQT FNASECIDKG (SEQ ID NO: 4).

[0195] As used herein, “B17L” refers to an orthopoxvirus (e.g., vaccinia, e.g., Copenhagen) gene. An example of a protein sequence encoded by an exemplary B17L gene in a Copenhagen strain of the vaccinia virus is given in UniProtKB database entry P21075 and is reproduced below:

(SEQ ID NO: 5)
MSRKFMQVYEYDREQYLDEFIEDRYNDSFITSPEYYSAEKYMCRYTTLNHN
CVNVRRCALDSKLLHDIITNCKIYNNIELVRATKFVYYLDLIKCNWVSKVG
DSVLYPVIFITHTSTRNLDKVSVKTYKGVKVKKLNRCADHAIVINPFVKFK
LTLPNKTSHAKVLVTFCKLRTDITPVEAPLPGNVLVYTFPDINKRIPGYIH
VNIEGCIDGMIYINSSKFACVLKLHRSMYRIPPFPIDICSCCSQYTNDDIE
IPIHDLIKDVAIFKNKETVYYLKLNNKTIARFTYFNNIDTAITQEHEYVKI
ALGIVCKLMINNMHSIVGVNHSNTFVNCLLEDNV.

[0196] As used herein, “B 18R” refers to an orthopoxvirus (e.g., vaccinia, e.g., Copenhagen) gene, such as a gene that encodes an Ankyrin repeat protein. An example of a protein sequence encoded by an exemplary B 18R gene in a Copenhagen strain of the vaccinia virus is given in UniProtKB database entry P21076 and is reproduced below:

(SEQ ID NO: 6)
MSRRLIYVLNINRKSTHKIQENEIYTYFSHCNIDHTSTELDFVVKNYDLNR
RQHVTGYTALHCYLYNNYFTNDVLKILLNHDVNVTMKTSSGRMPVYILLTR
CCNISHDVVIDMIDKDKNHLSHRDYSNLLLEYIKSRYMLLKEEDIDENIVS
TLLDKGIDPNFKQDGYTALHYYYLCLAHVYKPGECRKPITIKKAKRIISLF
IQHGANLNALDNCGNTPFHLYLSIEMCNNIHMTKMLLTFNPNFKICNNHGL
TPILCYITSDYIQHDILVMLIHHYETNVGEMPIDERRMIVFEFIKTYSTRP
ADSITYLMNRFKNINIYTRYEGKTLLHVACEYNNTQVIDYLIRINGDINAL
TDNNKHATQLIIDNKENSPYTINCLLYILRYIVDKNVIRSLVDQLPSLPIF
DIKSFEKFISYCILLDDTFYDRHVKNRDSKTYRYAFSKYMSFDKYDGIITK
CHDETMLLKLSTVLDTTLYAVLRCHNSRKLRRYLTELKKYNNDKSFKIYSN
IMNERYLNVYYKDMYVSKVYDKLFPVFTDKNCLLTLLPSEIIYEILYMLTI
NDLYNISYPPTKV.

[0197] As used herein, “B19R” refers to an orthopoxvirus (e.g., vaccinia, e.g., Copenhagen) gene, such as a gene that encodes a IFN-alpha-beta-receptor-like secreted glycoprotein. An example of a protein sequence encoded by an exemplary B19R gene in a Copenhagen strain of the vaccinia virus is given in UniProtKB database entry P21077 and is reproduced below:

(SEQ ID NO: 7)
MTMKMMVHIYFVSLSLLLLLFHSYAIDIENEITEFFNKMRDTLPAKDSKWL
NPACMFGGTMNDMATLGEPFSAKCPPIEDSLLSHRYKDYVVKWERLEKNRR
RQVSNKRVKHGDLWIANYTSKFSNRRYLCTVTTKNGDCVQGIVRSHIKKPP
SCIPKTYELGTHDKYGIDLYCGILYAKHYNNITWYKDNKEINIDDIKYSQT
GKELIIHNPELEDSGRYDCYVHYDDVRIKNDIVVSRCKILTVIPSQDHRFK
LILDPKINVTIGEPANITCTAVSTSLLIDDVLIEWENPSGWLIGFDFDVYS
VLTSRGGITEATLYFENVTEEYIGNTYKCRGHNYYFEKTLTTTVVLE.

[0198] As used herein, “B20R” refers to an orthopoxvirus (e.g., vaccinia, e.g., Copenhagen) gene, such as a gene that encodes an Ankyrin repeat protein. An example of a protein sequence encoded by an exemplary B20R gene in a Copenhagen strain of the vaccinia virus is given in UniProtKB database entry P21078 and is reproduced below:

(SEQ ID NO: 8)
MDEDTRLSRYLYLTDREHINVDSIKQLCKISDPNACYRCGCTALHEYFYNY
RSVNGKYKYRYNGYYQYYSSSDYENYNEYYYDDYDRTGMNSESDSESDNIS
IKTEYENEYEFYDETQDQSTQHNDL.

[0199] As used herein, “C1L” refers to an orthopoxvirus (e.g., vaccinia, e.g., Copenhagen) gene. An example of a protein sequence encoded by an exemplary C1L gene in a Copenhagen strain of the vaccinia virus is given in UniProtKB database entry P21036 and is reproduced below:

(SEQ ID NO: 9)
MVKNNKISNSCRMIMSTNPNNILMRHLKNLTDDEFKCIIHRSSDFLYLSDS
DYTSITKETLVSEIVEEYPDDCNKILAIIFLVLDKDIDVDIETKLKPKPAV
RFAILDKMTEDIKLTDLVRHYFRYIEQDIPLGPLFKKIDSYRTRAINKYSK
ELGLATEYFNKYGHLMFYTLPIPYNRFFCRNSIGFLAVLSPTIGHVKAFYK
FIEYVSIDDRRKFKKELMSK.

[0200] As used herein, “C2L” refers to an orthopoxvirus (e.g., vaccinia, e.g., Copenhagen) gene, such as a gene that encodes a kelch-like protein that affects calcium-independent adhesion to the extracellular matrix. An example of a protein sequence encoded by an exemplary C2L gene in a Copenhagen strain of the vaccinia virus is given in UniProtKB database entry P21037 and is reproduced below:

(SEQ ID NO: 10)
MESVIFSINGEIIQVNKEIITASPYNFFKRIQDHHLKDEATILNGINYHAF
ESLLDYMRWKKINITINNVEMILVAAVIIDVPPVVDLCVKTMIHNINSTNC
IRMFNFSKRYGIKKLYNASMSEIINNITAVTSDPEFGKLSKDELTTILSHE
DVNVNHEDVTAMILLKWIHKNPNDVDIINILHPKFMTNTMRNAISLLGLTI
SKSTKPVTRNGIKHNIVVIKNSDYISTITHYSPRTEYWTIVGNTDRQFYNA
NVLHNCLYIIGGMINNRHVYSVSRVDLETKKWKTVTNMSSLKSEVSTCVND
GKLYVIGGLEFSISTGVAEYLKHGTSKWIRLPNLITPRYSGASVFVNDDIY
VMGGVYTTYEKYVVLNDVECFTKNRWIKKSPMPRHHSIVYAVEYDGDIYVI
TGITHETRNYLYKYIVKEDKWIELYMYFNHVGKMFVCSCGDYILIIADAKY
EYYPKSNTWNLFDMSTRNIEYYDMFTKDETPKCNVTHKSLPSFLSNCEKQF
LQ.

[0201] As used herein, “F1L” refers to a orthopoxvirus (e.g., vaccinia, e.g., Copenhagen) gene, such as a gene that encodes a caspase-9 inhibitor. An example of a protein sequence encoded by an exemplary F1L gene in a Copenhagen strain of the vaccinia virus is given in UniProtKB database entry P68450 and is reproduced below:

(SEQ ID NO: 11)
MLSMFMCNNIVDYVDDIDNGIVQDIEDEASNNVDHDYVYPLPENMVYRFDK
STNILDYLSTERDHVMMAVRYYMSKQRLDDLYRQLPTKTRSYIDIINIYCD
KVSNDYNRDMNIMYDMASTKSFTVYDINNEVNTILMDNKGLGVRLATISFI
TELGRRCMNPVKTIKMFTLLSHTICDDCFVDYITDISPPDNTIPNTSTREY
LKLIGITAIMFATYKTLKYMIG.

[0202] As used herein, “F2L” refers to an orthopoxvirus (e.g., vaccinia, e.g., Copenhagen) gene, such as a gene that encodes a deoxyuridine triphosphatase (dUTPase). An example of a protein sequence encoded by an exemplary F2L gene in a Copenhagen strain of the vaccinia virus is given in UniProtKB database entry P68634 and is reproduced below:

(SEQ ID NO: 12)
MFNMNINSPVRFVKETNRAKSPTRQSPGAAGYDLYSAYDYTIPPGERQLIK
TDISMSMPKICYGRIAPRSGLSLKGIDIGGGVIDEDYRGNIGVILINNGKC
TFNVNTGDRIAQLIYQRIYYPELEEVQSLDSTNRGDQGFGSTGLR.

[0203] As used herein, “F3L” refers to an orthopoxvirus (e.g., vaccinia, e.g., Copenhagen) gene, such as a gene that encodes a kelch-like protein that is an innate immune response modifier and a virulence factor. An example of a protein sequence encoded by an exemplary F3L gene in a Copenhagen strain of the vaccinia virus is given in UniProtKB database entry P21013 and is reproduced below:

(SEQ ID NO: 13)
MPIFVNTVYCKNILALSMTKKFKTIIDAIGGNIIVNSTILKKLSPYFRTHL
RQKYTKNKDPVTRVCLDLDIHSLTSIVIYSYTGKVYIDSHNVVNLLRASIL
TSVEFIIYTCINFILRDFRKEYCVECYMMGIEYGLSNLLCHTKNFIAKHFL
ELEDDIIDNFDYLSMKLILESDELNVPDEDYVVDFVIKWYIKRRNKLGNLL
LLIKNVIRSNYLSPRGINNVKWILDCTKIFHCDKQPRKSYKYPFIEYPMNM
DQIIDIFHMCTSTHVGEVVYLIGGWMNNEIHNNAIAVNYISNNWIPIPPMN
SPRLYATGIPANNKLYVVGGLPNPTSVERWFHGDAAWVNMPSLLKPRCNPA
VASINNVIYVMGGHSETDTTTEYLLPNHDQWQFGPSTYYPHYKSCALVFGR
RLFLVGRNAEFYCESSNTWTLIDDPIYPRDNPELIIVDNKLLLIGGFYRGS
YIDTIEVYNHHTYSWNIWDGK.

[0204] As used herein, “K1L” refers to an orthopoxvirus (e.g., vaccinia, e.g., Copenhagen) gene, such as a gene that encodes an NF-κB inhibitor. An example of a protein sequence encoded by an exemplary K1L gene in a Copenhagen strain of the vaccinia virus is given in UniProtKB database entry P20632 and is reproduced below:

(SEQ ID NO: 14)
MDLSRINTWKSKQLKSFLSSKDTFKADVHGHSALYYAIADNNVRLVCTLL
NAGALKNLLENEFPLHQAATLEDTKIVKILLFSGMDDSQFDDKGNTALYY
AVDSGNMQTVKLFVKKNWRLMFYGKTGWKTSFYHAVMLNDVSIVSYFLSE
IPSTFDLAILLSCIHTTIKNGHVDMMILLLDYMTSTNTNNSLLFIPDIKL
AIDNKDIEMLQALFKYDINIYSVNLENVLLDDAEITKMIIEKHVEYKSDS
YTKDLDIVKNNKLDEIISKNKELRLMYVNCVKKN.

[0205] As used herein, “K2L” refers to an orthopoxvirus (e.g., vaccinia, e.g., Copenhagen) gene, such as a gene that encodes a serine protease inhibitor that prevents cell fusion. An example of a protein sequence encoded by an exemplary K2L gene in a Copenhagen strain of the vaccinia virus is given in UniProtKB database entry P20532 and is reproduced below:

(SEQ ID NO: 15)
MIALLILSLTCSVSTYRLQGFTNAGIVAYKNIQDDNIVFSPFGYSFSMFM
SLLPASGNTRIELLKTMDLRKRDLGPAFTELISGLAKLKTSKYTYTDLTY
QSFVDNTVCIKPLYYQQYHRFGLYRLNFRRDAVNKINSIVERRSGMSNVV
DSNMLDNNTLWAIINTIYFKGTWQYPFDITKTRNASFTNKYGTKTVPMMN
VVTKLQGNTITIDDEEYDMVRLPYKDANISMYLAIGDNMTHFTDSITAAK
LDYWSFQLGNKVYNLKLPKFSIENKRDIKSIAEMMAPSMFNPDNASFKHM
TRDPLYIYKMFQNAKIDVDEQGTVAEASTIMVATARSSPEKLEFNTPFVF
IIRHDITGFILFMGKVESP.

[0206] As used herein, “K3L” refers to an orthopoxvirus (e.g., vaccinia, e.g., Copenhagen) gene, such as a gene that encodes a PKR inhibitor. An example of a protein sequence encoded by an exemplary K3L gene in a Copenhagen strain of the vaccinia virus is given in UniProtKB database entry P20639 and is reproduced below:

(SEQ ID NO: 16)
MLAFCYSLPNAGDVIKGRVYEKDYALYIYLFDYPHSEAILAESVKMHMDR
YVEYRDKLVGKTVKVKVIRVDYTKGYIDVNYKRMCRHQ.

[0207] As used herein, “K4L” refers to an orthopoxvirus (e.g., vaccinia, e.g., Copenhagen) gene, such as a gene that encodes a DNA modifying nuclease (e.g., DNA nicking enzyme). An example of a protein sequence encoded by an exemplary K4L gene in a Copenhagen strain of the vaccinia virus is given in UniProtKB database entry P20537 and is reproduced below:

(SEQ ID NO: 17)
MNPDNTIAVITETIPIGMQFDKVYLSTFNMWREILSNTTKTLDISSFYWS
LSDEVGTNFGTIILNEIVQLPKRGVRVRVAVNKSNKPLKDVERLQMAGVE
VRYIDITNILGGVLHTKFWISDNTHIYLGSANMDWRSLTQVKELGIAIFN
NRNLAADLTQIFEVYWYLGVNNLPYNWKNFYPSYYNTDHPLSINVSGVPH
SVFIASAPQQLCTMERTNDLTALLSCIRNASKFVYVSVMNFIPIIYSKAG
KILFWPYIEDELRRSAIDRQVSVKLLISCWQRSSFIMRNFLRSIAMLKSK
NIDIEVKLFIVPDADPPIPYSRVNHAKYMVTDKTAYIGTSNWTGNYFTDT
CGASINITPDDGLGLRQQLEDIFMRDWNSKYSYELYDTSPTKRCKLLKNM
KQCTNDIYCDEIQPEKEIPEYSLE.

[0208] As used herein, “K5L” refers to an orthopoxvirus (e.g., vaccinia, e.g., Copenhagen) gene, such as a gene that encodes a putative monoglyceride lipase. An example of a protein sequence encoded by an exemplary K5L gene in a Copenhagen strain of the vaccinia virus is given in UniProtKB database entry P21084 and is reproduced below:

(SEQ ID NO: 18)
MGATISILASYDNPNLFTAMILMSPLVNADAVSRLNLLAAKLMGTITPNA
PVGKLCPESVSRDMDKVYKYQYDPLINHEKIKAGFASQVLKATNKVRKII
SKINTPRLSYSREQTMRLVMFQVHIISCNMQIVIEK.

[0209] As used herein, “K6L” refers to an orthopoxvirus (e.g., vaccinia, e.g., Copenhagen) gene, such as a gene that encodes a putative monoglyceride lipase. An example of a protein sequence encoded by an exemplary K6L gene in a Copenhagen strain of the vaccinia virus is given in UniProtKB database entry P68465 and is reproduced below:

(SEQ ID NO: 19)
MSANCMFNLDNDYIYWKPITYPKALVFISHGAGKHSGRYDELAENISSLG
ILVFSHDHIGHGRSNGEKMMIDDFGTARGNY.

[0210] As used herein, “K7R” refers to an orthopoxvirus (e.g., vaccinia, e.g., Copenhagen) gene, such as a gene that encodes an inhibitor of NF-κB and IRF3. An example of a protein sequence encoded by an exemplary K7R gene in a Copenhagen strain of the vaccinia virus is given in UniProtKB database entry P68467 and is reproduced below:

(SEQ ID NO: 20)
MATKLDYEDAVFYFVDDDKICSRDSIIDLIDEYITWRNHVIVFNKDITSC
GRLYKELMKFDDVAIRYYGIDKINEIVEAMSEGDHYINFTKVHDQESLFA
TIGICAKITEHWGYKKISESRFQSLGNITDLMTDDNINILILFLEKKLN.

[0211] As used herein, “M1L” refers to an orthopoxvirus (e.g., vaccinia, e.g., Copenhagen) gene, such as a gene that encodes an Ankyrin repeat protein. An example of a protein sequence encoded by an exemplary M1L gene in a Copenhagen strain of the vaccinia virus is given in UniProtKB database entry P20640 and is reproduced below:

(SEQ ID NO: 21)
MIFVIESKLLQIYRNRNRNINFYTTMDNIMSAEYYLSLYAKYNSKNLDVF
RNMLQAIEPSGNNYHILHAYCGIKGLDERFVEELLHRGYSPNETDDDGNY
PLHIASKINNNRIVAMLLTHGADPNACDKHNKTPLYYLSGTDDEVIERIN
LLVQYGAKINNSVDEEGCGPLLACTDPSERVFKKIMSIGFEARIVDKFGK
NHIHRHLMSDNPKASTISWMMKLGISPSKPDHDGNTPLHIVCSKTVKNVD
IIDLLLPSTDVNKQNKFGDSPLTLLIKTLSPAHLINKLLSTSNVITDQTV
NICIFYDRDDVLEIINDKGKQYDSTDFKMAVEVGSIRCVKYLLDNDIICE
DAMYYAVLSEYETMVDYLLFNHFSVDSVVNGHTCMSECVRLNNPVILSKL
MLHNPTSETMYLTMKAIEKDKLDKSIIIPFIAYFVLMHPDFCKNRRYFTS
YKRFVTDYVHEGVSYEVFDDYF.

[0212] As used herein, “M2L” refers to an orthopoxvirus (e.g., vaccinia, e.g., Copenhagen) gene, such as a gene that encodes an inhibitor of NF-κB and apoptosis. An example of a protein sequence encoded by an exemplary M2L gene in a Copenhagen strain of the vaccinia virus is given in UniProtKB database entry Q1PJ18 and is reproduced below:

(SEQ ID NO: 22)
MVYKLVLLFCIASLGYSVEYKNTICPPRQDYRYWYFAAELTIGVNYDINS
TIIGECHMSESYIDRNANIVLTGYGLEINMTIMDTDQRFVAAAEGVGKDN
KLSVLLFTTQRLDKVHHNISVTITCMEMNCGTTKYDSDLPESIHKSSSCD
ITINGSCVTCVNLETDPTKINPHYLHPKDKYLYHNSEYGMRGSYGVTFID
ELNQCLLDIKELSYDICYRE.

[0213] As used herein, “N1L” refers to an orthopoxvirus (e.g., vaccinia, e.g., Copenhagen) gene, such as a gene that encodes a BCL-2-like protein that inhibits NF-κB and apoptosis. An example of a protein sequence encoded by an exemplary N1L gene in a Copenhagen strain of the vaccinia virus is given in UniProtKB database entry P21054 and is reproduced below:

(SEQ ID NO: 23)
MRTLLIRYILWRNDNDQTYYNDDFKKLMLLDELVDDGDVCTLIKNMRMTL
SDGPLLDRLNQPVNNIEDAKRMIAISAKVARDIGERSEIRWEESFTILFR
MIETYFDDLMIDLYGEK.

[0214] As used herein, “N2L” refers to an orthopoxvirus (e.g., vaccinia, e.g., Copenhagen) gene, such as a gene that encodes an inhibitor of IRF3. An example of a protein sequence encoded by an exemplary N2L gene in a Copenhagen strain of the vaccinia virus is given in UniProtKB database entry P20641 and is reproduced below:

(SEQ ID NO: 26)
MTSSAMDNNEPKVLEMVYDATILPEGSSMDPNIMDCINRHINMCIQRTYS
SSIIAILNRFLTMNKDELNNTQCHIIKEFMTYEQMAIDHYGEYVNAILYQ
IRKRPNQHHTIDLFKKIKRTPYDTFKVDPVEFVKKVIGFVSILNKYKPVY
SYVLYENVLYDEFKCFINYVETKYF.

[0215] Exemplary Copenhagen strain nucleotide sequences of the coding sequences (CDSs) of the genes described herein are provided in Table 42 below. The nucleotide sequence of an exemplary wild-type Copenhagen strain vaccinia virus genome is also provided in Table 42 below. Another exemplary wild-type Copenhagen strain vaccinia virus genome is SEQ ID NO: 590 (as provided in Table 42) but with 1, 2, 3, 4, 5, 6, 7, 8, 9, 10, 11, 12, 13, 14, 15, 16, 17, 18, 19, 20, or all of the nucleotide polymorphisms identified in Table 46. In certain embodiments, the CDS of the genes described herein have nucleotide sequences that are identical to the nucleotide sequences provided in Table 42 except for 1, 2, 3, or more of the nucleotide polymorphisms identified in Table 46.

### 4. BRIEF DESCRIPTION OF THE FIGURES

[0216] FIG. 1 shows a phylogenetic analysis of 59 poxvirus strains, including the Orthopoxvirus virus strains.

[0217] FIG. 2 shows the abundances of different viral strains after passaging 5 Vaccinia viruses in different tumor types.

[0218] FIG. 3 shows the abilities of Vaccinia wild-type strains to replicate in various different patient tumor cores.

[0219] FIG. 4 shows plaque size measurements of different Vaccinia wild-type strains.

[0220] FIG. 5 shows the genomic structure of a 5p deletion (CopMD5p) and a 3p deletion (CopMD3p). Both CopMD5p and CopMD3p were crossed to generate CopMD5p3p.

[0221] FIG. 6 shows a heatmap showing cancer cell death following infection with either Copenhagen or CopMD5p3p at various doses.

[0222] FIG. 7 shows the growth curves of Copenhagen and CopMD5p3p replication in 4 different cancer cell lines.

[0223] FIG. 8 shows the ability of Copenhagen and CopMD5p3p to replicate in patient ex vivo samples as shown by titering.

[0224] FIG. 9 shows that the modified CopMD5p3p virus forms different plaques than the parental virus. CopMD5p3p plaques are much clearer in the middle, with visible syncytia (cell fusion).

[0225] FIG. 10 shows CopMD5p3p induces syncytia (cell fusion) in 786-O cells.

[0226] FIG. 11 shows that CopMD5p3p is able to control tumor growth similarly to Copenhagen wild-type but does not cause weight loss.

[0227] FIG. 12 shows that CopMD5p3p does not cause pox lesion formation when compared to two other Vaccinia strains (Copenhagen and Wyeth) harboring the oncolytic knockout of thymidine kinase.

[0228] FIG. 13 shows the IVIS bio-distribution of Vaccinia after systemic administration in nude CD-1 mice. Luciferase encoding CopMD5p3p (TK KO) is tumor specific and does not replicate in off target tissues.

[0229] FIG. 14 shows the bio-distribution of Vaccinia after systemic administration. CopMD5p3p replicates similarly to other oncolytic Vaccinia in the tumour but replicates less in off target tissues/organs.

[0230] FIG. 15 shows the immunogenicity of Vaccinia in Human PBMCs. The ability of CopMD5p3p to induce human innate immune cell activation is stronger than that of wild-type Copenhagen.

[0231] FIG. 16 shows the immunogenicity of Vaccinia in Mouse Splenocytes. The ability of CopMD5p3p to induce mouse innate immune cell activation is stronger than that of Copenhagen.

[0232] FIG. 17 shows the immunogenicity of Vaccinia in Human cells. The ability of CopMD5p3p to activate NF-kB immune transcription factor is stronger than that of Copenhagen or VVdd but similar to that of MG-1.

[0233] FIG. 18 shows the synergy with immune checkpoint inhibitor Anti-CTLA-4 antibody in an aggressive melanoma model (B16-F10 syngeneic melanoma model in C57BL6 mice). In vivo efficacy measured by survival in an immune competent murine model treated with Vaccinia and Immune Checkpoint Inhibitors Anti-CTLA-4 antibody.

[0234] FIG. 19 shows the synergy with immune checkpoint inhibitor Anti-CTLA-4 antibody. In vivo efficacy measured by tumor growth (top row) and survival (bottom row) in an immune competent murine model treated with Vaccinia and Immune Checkpoint Inhibitor Anti-CTLA-4 antibody. CopMD5p3p (left column) is compared to oncolytic Copenhagen TK KO (right column).

[0235] FIG. 20 shows the synergy with immune checkpoint inhibitor Anti-PD1 antibody. In vivo efficacy measured by tumor growth (top row) and survival (bottom row) in an immune competent murine model treated with Vaccinia and Immune Checkpoint Inhibitor Anti-PD1 antibody. CopMD5p3p (left column) is compared to oncolytic Copenhagen TK KO (right column).

[0236] FIG. 21 shows the synergy with immune checkpoint inhibitor Anti-PD1 antibody and Anti-CTLA-4 antibody. In vivo efficacy measured by tumor growth (top row) and survival (bottom row) in an immune competent murine model treated with Vaccinia and Immune Checkpoint Inhibitors Anti-PD1 antibody and Anti-CTLA-4 antibody. CopMD5p3p (left column) is compared to oncolytic Copenhagen TK KO (right column).

[0237] FIG. 22 shows a scheme for the production of modified poxvirus vectors (e.g., modified vaccinia virus vectors, such as modified Copenhagen vaccinia virus vectors) harboring a 5′ (“5p”) major deletion locus (left) and a 3′ (“3p”) major deletion locus (right). 5p targeting construct is composed of 1 kb homologous region to C2L, followed by an eGFP expressing transgene, and 1 kb homologous region to F3L. 3p targeting construct is composed of 729bp homologous region to B14R, followed by the mCherry expressing transgene, and a 415bp homologous region to B29R.

[0238] FIG. 23 shows the ability of wild-type Copenhagen vaccinia virus and several modified Copenhagen vaccinia virions to proliferate in various cell lines.

[0239] FIG. 24 shows the cytotoxic effects of wild-type Copenhagen vaccinia virus and several modified Copenhagen vaccinia virions on various cell lines, as assessed by crystal violet (upper panels) and an Alamar Blue assay (lower panel). The order of strains listed for each cell line along the x-axis of the chart shown in the lower panel is as follows: from left to right, CopMD5p, CopMD5p3p, CopMD3p, and CopWT (wildtype Copenhagen vaccinia strain).

[0240] FIG. 25 shows the distribution of wild-type Copenhagen vaccinia virus and several modified Copenhagen vaccinia virions upon administration to mice.

[0241] FIG. 26 shows the ability of wild-type Copenhagen vaccinia virus and several modified Copenhagen vaccinia virions to activate Natural Killer (NK) cells and promote anti-tumor immunity.

[0242] FIG. 27 shows the ability of wild-type Copenhagen vaccinia virus and several modified Copenhagen vaccinia virions to enhance NK cell-mediated degranulation against HT29 cells, a measure of NK cell activity and anti-tumor immunity.

[0243] FIG. 28 shows the ability of wild-type Copenhagen vaccinia virus and several modified Copenhagen vaccinia virions to prime T-cells to initiate an anti-tumor immune response.

[0244] FIG. 29 shows the ability of wild-type Copenhagen vaccinia virus and several modified Copenhagen vaccinia virions to spread to distant locations from the initial point of infection.

[0245] FIG. 30 shows the ability of wild-type Copenhagen vaccinia virus and several modified Copenhagen vaccinia virions to form plaques, a measure of viral proliferation.

[0246] FIG. 31 shows the ability of wild-type Copenhagen vaccinia virus and several modified Copenhagen vaccinia virions to form plaques in U2OS cells.

[0247] FIG. 32 shows the ability of wild-type Copenhagen vaccinia virus and several modified Copenhagen vaccinia virions to form plaques in 786-O cells.

[0248] FIG. 33 shows the percentage of genes deleted in CopMD5p3p in various poxvirus genomes.

[0249] FIG. 34 shows infection of normal versus cancer cell lines of SKV-B8R+ virus.

[0250] FIG. 35 shows SKV-B8R+ does not impair interferon signaling.

[0251] FIG. 36 shows B8R recombination targeting strategy for FLt3-LG and IL-12-TM transgenes.

[0252] FIG. 37 shows SKV (CopMD5p3p-B8R−) has similar efficacy in tumour control compared to SKV-B8R+.

[0253] FIG. 38 shows a linear cartoon schematic depicting the genomic organization of the SKV-123v2 oncolytic platform compared to the base wildtype Copenhagen vaccinia virus genome. FRT is a recognition site for the Flippase enzyme.

[0254] FIG. 39 shows SKV engineered to express 2 immunotherapeutic transgenes and an antibody.

[0255] FIG. 40 shows SKV engineered to express 2 immunotherapeutic transgenes and an antibody.

[0256] FIG. 41 shows hIL-12 production quantified for various SKV viruses expressing transgenes.

[0257] FIG. 42 shows IL-12p35 (IL-12) cell surface immunostaining on live Vero cells infected with SKV-123, SKV-3 and control SKV-eGFP viruses (MOI 0.1, 24 hrs post infection).

[0258] FIG. 43 shows SKV expressing murine IL-12 p35 membrane bound has greater efficacy in controlling murine tumors.

[0259] FIG. 44 shows major double deletions engineered in various vaccinia strains enhance cancer cell killing in vitro.

[0260] FIG. 45 shows the phenotypic characterization of HeLa cells infected with various vaccinia strains.

[0261] FIG. 46 shows 5p3p vaccinia strains do not induce weight loss compared to wildtype strains. Mouse body mass measurements are shown. CD-1 nude mice were treated with 1×10⁷ pfu (particle forming units) via intravenously tail vein injection and measured at the indicated time points.

[0262] FIG. 47 shows 5p3p vaccinia strains do not induce pox lesions compared to wildtype strains. Assessment of the presence of pox lesions is shown. CD-1 nude mice were treated with 1×10⁷ pfu with indicated vaccinia virus strains via intravenously tail vein injection. Mice were examined for pox lesions 6 days post-injection.

[0263] FIGS. 48A-48H show tumor volume over time and survival curves in eight xenograft mouse models treated with 0.05 ml of SKV (vaccinia virus) (dose: 1e7 pfu). FIG. 48A shows results from the MiaPaca-2 xenograft mouse model. FIG. 48B shows results from the PC-3 xenograft mouse model. FIG. 48C shows results from the U87MG xenograft model. FIG. 49D shows results from the UACC-62 xenograft model. FIG. 48E shows results from the UM-UC-3 xenograft mouse model. FIG. 48F shows results from the COLO-205 xenograft mouse model. FIG. 48G shows results from the NCI-H460 xenograft mouse model. FIG. 48H shows results from the HT29 xenograft model.

[0264] FIG. 49 shows average tumor volumes over time and survival curves in a transgenic C57/BL6 mouse model expressing human CTLA-4, with MC-38 tumors treated with SKV encoding active transgenes. Animals were then randomized into 5 treatment groups and then treated with PBS, PBS plus Ipilimumab, SKV, anti-PD-1 antibody, SKV-12m3v2-eGFP or SKV-12m3v2-eGFP plus anti-PD-1 antibody. SKV-12m3v2-eGFP is SKV expressing the human anti-CTLA-4 antibody, human Flt3 ligand and mouse IL-12 TM p35.

[0265] FIG. 50 shows individual tumor volumes of the experiment shown in FIG. 49.

[0266] FIG. 51 shows average tumor volumes over time in MC-38 mouse models treated with either membrane-bound mouse IL-12 p35 or membrane-bound mouse IL-12 p70.

[0267] FIG. 52 shows results from a heterologous prime:boost oncolytic vaccine regimen using a virus (SKVB^{8R+TK-} encoding OVA antigen).

[0268] FIGS. 53A-53F show the biodistribution of FLT3-L and Anti-CTLA-4 Antibody in serum and tissue of BALB/c mice engrafted with CT26 tumor cells and administered SKV-123v2 either IT or IV.

[0269] FIGS. 54A-54D show the biodistribution of IL-12-TM in serum and tissue of BALB/c mice engrafted with CT26 tumor cells and administered SKV-123v2 either IT or IV.

[0270] FIG. 55 shows tumor volume in NGS mice either untreated or treated with SKV-123v2.

[0271] FIG. 56 shows Alamar Blue viability kinetics of SKV-123v2 virus-infected cancer cells (top panels) and normal cells (bottom panels).

[0272] FIG. 57 shows virus replication growth curves in SKV-123v2 virus-infected cancer cells (786-O, HeLa) and normal cells (PBMC, PrEC).

[0273] FIG. 58 shows anti-CTLA-4 antibody expression levels in SKV-123v2 virus-infected cancer cells (786-O, HeLa) and normal cells (PBMC, PrEC).

[0274] FIG. 59 shows FLT3L expression levels in SKV-123v2 virus-infected cancer cells (786-O, HeLa) and normal cells (PBMC, PrEC).

[0275] FIG. 60 shows the design of a targeting construct for insertion of a transgene in vaccinia virus genome. Construct can either be a PCR product of amplification or part of a bacterial plasmid. Number of transgenes as well as their orientation are flexible. Order of transgenes and Fluorescent marker are flexible.

### 5. DETAILED DESCRIPTION

[0276] The present invention features genetically modified orthopoxviruses, such as vaccinia viruses (e.g., Copenhagen, Western Reserve, Wyeth, Lister, EM63, ACAM2000, LC16m8, CV-1, modified vaccinia Ankara (MVA), Dairen I, GLV-1h68, IHD-J, L-IVP, LC16m8, LC16mO, Tashkent, Tian Tan, and WAU86/88-1 viruses), as well as the use of the same for the treatment of various cancers. The invention is based in part on the discovery that orthopoxviruses, such as Copenhagen, Western Reserve, Wyeth, Lister, EM63, ACAM2000, LC16m8, CV-1, modified vaccinia Ankara (MVA), Dairen I, GLV-1h68, IHD-J, L-IVP, LC16m8, LC16mO, Tashkent, Tian Tan, and WAU86/88-1 viruses, exhibit markedly improved oncolytic activity, replication in tumors, infectivity, immune evasion, tumor persistence, capacity for incorporation of exogenous DNA sequences, and amenability for large scale manufacturing when the viruses are engineered to contain deletions in one or more, or all, of the C2L, C1L, N1L, N2L, M1L, M2L, K1L, K2L, K3L, K4L, K5L, K6L, K7R, F1L, F2L, F3L, B14R, B15R, B16R, B17L, B18R, B19R, B20R, K ORF A, K ORF B, B ORF E, B ORF F, and B ORF G genes and copies of the B21R, B22R, B23R, B24R, B25R, B26R, B27R, B28R, and B29R ITRs. In various embodiments of the invention, the modified orthopoxviruses contain a deletion of the B8R gene. While inactive in mice, the B8R gene neutralizes antiviral activity of human IFN-γ. In various embodiments, at least one transgene is subsequently inserted into locus of the B8R gene (now deleted) through a homologous recombination targeting strategy. In various embodiments, the modified orthopoxvirus expresses at least one of three transgenes: IL-12-TM, FLT3-L and anti-CLTA4 antibody. As used herein, FLT3L, Flt-3 ligand, FLT3LG, FLT3-LG, FLT3-L are synonyms and all refer to FMS-like tyrosine kinase 3 ligand.

[0277] The orthopoxviruses described herein can be administered to a patient, such as a mammalian patient (e.g., a human patient) to treat a variety of cell proliferation disorders, including a wide range of cancers. The sections that follow describe orthopoxviruses and genetic modifications thereto, as well as methods of producing and propagating genetically modified orthopoxviruses and techniques for administering the same to a patient.

### 5.1. Poxvirus

[0278] Generally, a poxvirus viral particle is oval or brick-shaped, measuring some 200-400 nm long. The external surface is ridged in parallel rows, sometimes arranged helically. Such particles are extremely complex, containing over 100 distinct proteins. The extracellular forms contain two membranes (EEV: extracellular enveloped virions), whereas intracellular particles only have an inner membrane (IMV: intracellular mature virions). The outer surface is composed of lipid and protein that surrounds the core, which is composed of a tightly compressed nucleoprotein. Antigenically, poxviruses are also very complex, inducing both specific and cross-reacting antibodies. There are at least ten enzymes present in the particle, mostly concerned with nucleic acid metabolism/genome replication.

[0279] The genome of the wild-type poxvirus is linear double-stranded DNA of 130-300 Kbp. The ends of the genome have a terminal hairpin loop with several tandem repeat sequences. Several poxvirus genomes have been sequenced, with most of the essential genes being located in the central part of the genome, while non-essential genes are located at the ends. There are about 250 genes in the poxvirus genome. Replication takes place in the cytoplasm, as the virus is sufficiently complex to have acquired all the functions necessary for genome replication. There is some contribution by the cell, but the nature of this contribution is not clear. However, even though poxvirus gene expression and genome replication occur in enucleated cells, maturation is blocked, indicating some role by the cell.

[0280] Once into the cell cytoplasm, gene expression is carried out by viral enzymes associated with the core. Expression is divided into 2 phases: early genes, which represent about of 50% genome, and are expressed before genome replication, and late genes, which are expressed after genome replication. The temporal control of expression is provided by the late promoters, which are dependent on DNA replication for activity. Genome replication is believed to involve self-priming, leading to the formation of high molecular weight concatemers, which are subsequently cleaved and repaired to make virus genomes. Viral assembly occurs in the cytoskeleton and probably involves interactions with the cytoskeletal proteins (e.g., actin-binding proteins). Inclusions form in the cytoplasm that mature into virus particles. Cell to cell spread may provide an alternative mechanism for spread of infection. Overall, replication of this large, complex virus is rather quick, taking just 12 hours on average. At least nine different poxviruses cause disease in humans, but variola virus and vaccinia are the best known. Variola strains are divided into variola major (25-30% fatalities) and variola minor (same symptoms but less than 1% death rate). Infection with both viruses occurs naturally by the respiratory route and is systemic, producing a variety of symptoms, but most notably with variola characteristic pustules and scarring of the skin.

### 5.2. Orthopoxvirus

### 5.2.1. Vaccinia Virus

[0281] Vaccinia virus is a member of the poxvirus or Poxviridae family, the Chordopoxyirinae subfamily, and the Orthopoxvirus genus. Orthopoxvirus is relatively more homogeneous than other members of the Chordopoxyirinae subfamily and includes 11 distinct but closely related species, which includes vaccinia virus, variola virus (causative agent of smallpox), cowpox virus, buffalopox virus, monkeypox virus, mousepox virus and horsepox virus species as well as others (see Moss, 1996).

[0282] Vaccinia virus is a large, complex enveloped virus having a linear double-stranded DNA genome of about 190 kb and encoding approximately 250 genes. Vaccinia is well-known for its role as a vaccine that eradicated smallpox. Post-eradication of smallpox, scientists have been exploring the use of vaccinia as a tool for delivering genes into biological tissues (gene therapy and genetic engineering). Vaccinia virus is unique among DNA viruses as it replicates only in the cytoplasm of the host cell. Therefore, a large genome is required to encode various enzymes and proteins needed for viral DNA replication. During replication, vaccinia produces several infectious forms, which differ in their outer membranes: the intracellular mature virion (IMV), the intracellular enveloped virion (IEV), the cell-associated enveloped virion (CEV), and the extracellular enveloped virion (EEV). IMV is the most abundant infectious form and is thought to be responsible for spread between hosts. On the other hand, the CEV is believed to play a role in cell-to-cell spread, and the EEV is thought to be important for long range dissemination within the host organism.

[0283] Vaccinia virus is closely related to the virus that causes cowpox. The precise origin of vaccinia is unknown, but the most common view is that vaccinia virus, cowpox virus, and variola virus (the causative agent for smallpox) were all derived from a common ancestral virus. There is also speculation that vaccinia virus was originally isolated from horses. A vaccinia virus infection is mild and typically asymptomatic in healthy individuals, but it may cause a mild rash and fever, with an extremely low rate of fatality. An immune response generated against a vaccinia virus infection protects that person against a lethal smallpox infection. For this reason, vaccinia virus was used as a live-virus vaccine against smallpox. The vaccinia virus vaccine is safe because it does not contain the smallpox virus, but occasionally certain complications and/or vaccine adverse effects may arise, especially if the vaccine is immunocompromised.

[0284] Exemplary strains of the vaccinia virus include, but are not limited to, Copenhagen, Western Reserve, Wyeth, Lister, EM63, ACAM2000, LC16m8, CV-1, modified vaccinia Ankara (MVA), Dairen I, GLV-1h68, IHD-J, L-IVP, LC16m8, LC16mO, Tashkent, Tian Tan, and WAU86/88-1.

### 5.2.2. Thymidine Kinase Mutants and Hemagglutinin Mutants

[0285] Several current clinical studies testing vaccinia virus as an oncolytic virus harbor deletions in the viral Thymidine Kinase (TK) gene. This deletion attenuates the virus, rendering the virus dependent upon the activity of cellular thymidine kinase for DNA replication and, thus, viral propagation. Cellular thymidine kinase is expressed at a low level in most normal tissues and at elevated levels in many cancer cells. Through metabolic targeting, TK-viruses can grow in cells that have a high metabolic rate (e.g., healthy cells or tumor cells) and will not grow well in cells that have low levels of thymidine kinase. Since there exist quiescent tumor cells (e.g., cancer stem cells), TK-iruses are likely compromised in their ability to kill this population of cancer cells just as chemotherapy is largely ineffective. In some embodiments, the modified viral vectors described in this disclosure retains virus synthetic machinery (including TK) and may propagate in quiescent cancer cells. In such embodiments, the viral modifications of this disclosure may allow the virus to be highly selective without deleting TK or other DNA metabolizing enzymes (e.g., ribonucleotide reductase) and could be more effective in tumors with a low metabolic rate. In some embodiments, the modified viral vectors described in this disclosure comprise a functional TK gene (for example, a wild-type TK gene). In other embodiments, the modified viral vectors described in this disclosure comprise a deletion(s) or loss-of-function mutation(s) in the TK gene.

[0286] Similarly, inactivation of the hemagglutinin (HA) gene of the vaccinia virus can result in attenuation of the virus. In some embodiments, the modified viral vectors described in this disclosure comprise a functional HA gene (for example, a wild-type HA gene). In other embodiments, the modified viral vectors described in this disclosure comprise a deletion(s) or loss-of-function mutation(s) in the HA gene.

[0287] In a specific embodiment, the modified viral vectors described in this disclosure comprise a functional TK gene (for example, a wild-type TK gene) and a functional HA gene (for example, a wild-type HA gene). In another specific embodiment, the modified viral vectors described in this disclosure comprise a functional TK gene (for example, a wild-type TK gene) and a deletion(s) or loss-of-function mutation(s) in the HA gene. In another specific embodiment, the modified viral vectors described in this disclosure comprise a deletion(s) or loss-of-function mutation(s) in the TK gene and a functional HA gene (for example, a wild-type HA gene). In another specific embodiment, the modified viral vectors described in this disclosure comprise a deletion(s) or loss-of-function mutation(s) in the TK gene and a deletion(s) or loss-of-function mutation(s) in the HA gene.

### 5.2.3. Recombinant Orthopoxvirus Genome

[0288] In one aspect, provided herein is a nucleic acid comprising a recombinant vaccinia virus genome, comprising: (a) deletions in the following genes: C2L, C1L, N1L, N2L, M1L, M2L, K1L, K2L, K3L, K4L, K5L, K6L, K7R, F1L, F2L, F3L, B8R, B14R, B15R, B16R, B17L, B18R, B19R, and B20R; (b) deletions in the following genes in the 3′ inverted terminal repeat (ITR): B21R, B22R, B23R, B24R, B25R, B26R, B27R, B28R, and B29R; and (c) a first transgene comprising a first nucleotide sequence encoding an antibody or antigen-binding fragment thereof that specifically binds to Cytotoxic T-lymphocyte Associated Protein 4 (CTLA-4); wherein the deletions in the C2L, F3L, B14R, and B29R vaccinia genes are partial deletions.

[0289] In certain embodiments, the nucleic acid further comprises a nucleotide sequence comprising at least one promoter operably linked to the first nucleotide sequence. In a specific embodiment, the at least one promoter operably linked to the first nucleotide sequence is an H5R promoter, a pS promoter, or a LEO promoter. In another specific embodiment, the at least one promoter operably linked to the first nucleotide sequence is an H5R promoter (e.g., an early H5R promoter, a late H5R promoter, or an early H5R promoter and a late H5R promoter).

[0290] In some embodiments, when the flanking endogenous vaccinia virus genes have the same orientation, the first nucleotide sequence is in the same orientation as the flanking endogenous vaccinia virus genes. In other embodiments, when the flanking endogenous vaccinia virus genes have the same orientation, the first nucleotide sequence is in the reverse orientation relative to the flanking endogenous vaccinia virus genes. In other embodiments, when the flanking endogenous vaccinia virus genes have opposite orientations, the first nucleotide sequence is in the same orientation as the flanking endogenous vaccinia virus gene that is closer to the 5′ end of the recombinant vaccinia virus genome. In other embodiments, when the flanking endogenous vaccinia virus genes have opposite orientations, the first nucleotide sequence is in the same orientation as the flanking endogenous vaccinia virus gene that is closer to the 3′ end of the recombinant vaccinia virus genome. In a specific embodiment, the flanking endogenous vaccinia virus genes are the C2L and F3L genes. In another specific embodiment, the flanking endogenous vaccinia virus genes are the C3L and F4L genes. In another specific embodiment, the flanking endogenous vaccinia virus genes are the B14R and B29R genes. In another specific embodiment, the flanking endogenous vaccinia virus genes are the B13R and B29R genes. In yet another embodiment, the first nucleotide sequence is in the same orientation as an endogenous vaccinia gene adjacent to the first nucleotide sequence. In a specific embodiment, the endogenous vaccinia gene adjacent to the first nucleotide sequence is the B13R gene.

[0291] In preferred embodiments, endogenous genes that flank a nucleotide sequence (i.e., the flanking endogenous genes of a nucleotide sequence) in this disclosure are the two endogenous genes closest to the nucleotide sequence (with one upstream and the other downstream of the nucleotide sequence). The endogenous genes can be partial genes or full-length genes.

[0292] In specific embodiments, the anti-CTLA-4 antibody or antigen-binding fragment thereof encoded by the first nucleotide sequence comprises the 6 complementarity-determining regions (CDRs) of ipilimumab. In specific embodiments, the first nucleotide sequence encodes an amino acid sequence comprising the amino acid sequence set forth in SEQ ID NO: 211. In specific embodiments, the first nucleotide sequence comprises the sequence set forth in SEQ ID NO: 214. In specific embodiments, the first nucleotide sequence is set forth in SEQ ID NO: 214.

[0293] In another aspect, provided herein is a nucleic acid comprising a recombinant vaccinia virus genome, comprising: (a) deletions in the following genes: C2L, C1L, N1L, N2L, M1L, M2L, K1L, K2L, K3L, K4L, K5L, K6L, K7R, F1L, F2L, F3L, B14R, B15R, B16R, B17L, B18R, B19R, and B20R; (b) deletions in the following genes in the 3′ ITR: B21R, B22R, B23R, B24R, B25R, B26R, B27R, B28R, and B29R; (c) a first transgene comprising a first nucleotide sequence encoding an antibody or antigen-binding fragment thereof that specifically binds to CTLA-4 (e.g., human CTLA-4); and (d) a nucleotide sequence comprising at least one promoter operably linked to the first nucleotide sequence, wherein the at least one promoter operably linked to the first nucleotide sequence is an H5R promoter, a pS promoter, or a LEO promoter; wherein the deletions in the C2L, F3L, B14R, and B29R vaccinia genes are partial deletions. In specific embodiments, the nucleic acid further comprises a deletion in the B8R gene.

[0294] In certain embodiments, the at least one promoter operably linked to the first nucleotide sequence is an H5R promoter (e.g., an early H5R promoter, a late H5R promoter, or an early H5R promoter and a late H5R promoter).

[0295] In some embodiments, when the flanking endogenous vaccinia virus genes have the same orientation, the first nucleotide sequence is in the same orientation as the flanking endogenous vaccinia virus genes. In other embodiments, when the flanking endogenous vaccinia virus genes have the same orientation, the first nucleotide sequence is in the reverse orientation relative to the flanking endogenous vaccinia virus genes. In other embodiments, when the flanking endogenous vaccinia virus genes have opposite orientations, the first nucleotide sequence is in the same orientation as the flanking endogenous vaccinia virus gene that is closer to the 5′ end of the recombinant vaccinia virus genome. In other embodiments, when the flanking endogenous vaccinia virus genes have opposite orientations, the first nucleotide sequence is in the same orientation as the flanking endogenous vaccinia virus gene that is closer to the 3′ end of the recombinant vaccinia virus genome. In a specific embodiment, the flanking endogenous vaccinia virus genes are the C2L and F3L genes. In another specific embodiment, the flanking endogenous vaccinia virus genes are the C3L and F4L genes. In another specific embodiment, the flanking endogenous vaccinia virus genes are the B14R and B29R genes. In another specific embodiment, the flanking endogenous vaccinia virus genes are the B13R and B29R genes. In yet another embodiment, the first nucleotide sequence is in the same orientation as an endogenous vaccinia gene adjacent to the first nucleotide sequence. In a specific embodiment, the endogenous vaccinia gene adjacent to the first nucleotide sequence is the B13R gene.

[0296] In specific embodiments, the anti-CTLA-4 antibody or antigen-binding fragment thereof encoded by the first nucleotide sequence comprises the 6 complementarity-determining regions (CDRs) of ipilimumab. In specific embodiments, the first nucleotide sequence encodes an amino acid sequence comprising the amino acid sequence set forth in SEQ ID NO: 211. In specific embodiments, the first nucleotide sequence comprises the sequence set forth in SEQ ID NO: 214. In specific embodiments, the first nucleotide sequence is set forth in SEQ ID NO: 214.

[0297] In another aspect, provided herein is a nucleic acid comprising a recombinant vaccinia virus genome, comprising: (a) deletions in the following genes: C2L, C1L, N1L, N2L, M1L, M2L, K1L, K2L, K3L, K4L, K5L, K6L, K7R, F1L, F2L, F3L, B8R, B14R, B15R, B16R, B17L, B18R, B19R, and B20R; (b) deletions in the following genes in the 3′ ITR: B21R, B22R, B23R, B24R, B25R, B26R, B27R, B28R, and B29R; and (c) a second transgene comprising a second nucleotide sequence encoding an Interleukin 12 (IL-12) polypeptide; wherein the deletions in the C2L, F3L, B14R, and B29R vaccinia genes are partial deletions.

[0298] In certain embodiments, the nucleic acid further comprises a nucleotide sequence comprising at least one promoter operably linked to the second nucleotide sequence. In a specific embodiment, the at least one promoter operably linked to the second nucleotide sequence is a late promoter. In a further specific embodiment, the late promoter comprises the nucleotide sequence of SEQ ID NO: 561, an F17R promoter, or a D13L promoter. In another further specific embodiment, the late promoter comprises the nucleotide sequence of SEQ ID NO: 561. In another embodiment, the F17R promoter comprises the nucleotide sequence of SEQ ID NO:563. In yet another embodiment, the D13L promoter comprises the nucleotide sequence of SEQ ID NO:562.

[0299] In some embodiments, when the flanking endogenous vaccinia virus genes have the same orientation, the second nucleotide sequence is in the same orientation as the flanking endogenous vaccinia virus genes. In other embodiments, when the flanking endogenous vaccinia virus genes have the same orientation, the second nucleotide sequence is in the reverse orientation relative to the flanking endogenous vaccinia virus genes. In other embodiments, when the flanking endogenous vaccinia virus genes have opposite orientations, the second nucleotide sequence is in the same orientation as the flanking endogenous vaccinia virus gene that is closer to the 5′ end of the recombinant vaccinia virus genome. In other embodiments, when the flanking endogenous vaccinia virus genes have opposite orientations, the second nucleotide sequence is in the same orientation as the flanking endogenous vaccinia virus gene that is closer to the 3′ end of the recombinant vaccinia virus genome. In a specific embodiment, the flanking endogenous vaccinia virus genes are the C2L and F3L genes. In another specific embodiment, the flanking endogenous vaccinia virus genes are the C3L and F4L genes. In another specific embodiment, the flanking endogenous vaccinia virus genes are the B14R and B29R genes. In another specific embodiment, the flanking endogenous vaccinia virus genes are the B13R and B29R genes. In yet another embodiment, the second nucleotide sequence is in the same orientation as an endogenous vaccinia gene adjacent to the second nucleotide sequence. In a specific embodiment, the endogenous vaccinia gene adjacent to the second nucleotide sequence is the B13R gene. In specific embodiments, the IL-12 polypeptide is membrane-bound. In specific embodiments, the IL-12 polypeptide comprises IL-12 p35 (e.g., human IL-12 p35), IL-12 p40 (e.g., human IL-12 p40) or IL-12 p70 (e.g., human IL-12 p70). In specific embodiments, the IL-12 polypeptide is membrane-bound and comprises IL-12 p35 (e.g., human IL-12 p35), or IL-12 p70 (e.g., human IL-12 p70), and a transmembrane domain and a cytoplasmic domain (e.g., the transmembrane and cytoplasmic domains of B7-1, TNFα, or FLT3L). In specific embodiments, the IL-12 polypeptide comprises the amino acid sequence set forth in SEQ ID NO: 212. In specific embodiments, the second nucleotide sequence comprises the sequence set forth in SEQ ID NO: 215. In specific embodiments, the second nucleotide sequence is set forth in SEQ ID NO: 215.

[0300] In another aspect, provided herein is a nucleic acid comprising a recombinant vaccinia virus genome, comprising: (a) deletions in the following genes: C2L, C1L, N1L, N2L, M1L, M2L, K1L, K2L, K3L, K4L, K5L, K6L, K7R, F1L, F2L, F3L, B14R, B15R, B 16R, B17L, B18R, B 19R, and B20R; (b) deletions in the following genes in the 3′ ITR: B21R, B22R, B23R, B24R, B25R, B26R, B27R, B28R, and B29R; (c) a second transgene comprising a second nucleotide sequence encoding an IL-12 polypeptide; and (d) a nucleotide sequence comprising at least one promoter operably linked to the second nucleotide sequence, wherein the at least one promoter operably linked to the second nucleotide sequence is a late promoter; wherein the deletions in the C2L, F3L, B14R, and B29R vaccinia genes are partial deletions. In specific embodiments, the nucleic acid further comprises a deletion in the B8R gene.

[0301] In certain embodiments, the late promoter comprises the nucleotide sequence of SEQ ID NO: 561, an F17R promoter, or a D13L promoter. In a specific embodiment, the late promoter comprises the nucleotide sequence of SEQ ID NO: 561. In another embodiment, the F17R promoter comprises the nucleotide sequence of SEQ ID NO:563. In yet another embodiment, the D13L promoter comprises the nucleotide sequence of SEQ ID NO:562.

[0302] In some embodiments, when the flanking endogenous vaccinia virus genes have the same orientation, the second nucleotide sequence is in the same orientation as the flanking endogenous vaccinia virus genes. In other embodiments, when the flanking endogenous vaccinia virus genes have the same orientation, the second nucleotide sequence is in the reverse orientation relative to the flanking endogenous vaccinia virus genes. In other embodiments, when the flanking endogenous vaccinia virus genes have opposite orientations, the second nucleotide sequence is in the same orientation as the flanking endogenous vaccinia virus gene that is closer to the 5′ end of the recombinant vaccinia virus genome. In other embodiments, when the flanking endogenous vaccinia virus genes have opposite orientations, the second nucleotide sequence is in the same orientation as the flanking endogenous vaccinia virus gene that is closer to the 3′ end of the recombinant vaccinia virus genome. In a specific embodiment, the flanking endogenous vaccinia virus genes are the C2L and F3L genes. In another specific embodiment, the flanking endogenous vaccinia virus genes are the C3L and F4L genes. In another specific embodiment, the flanking endogenous vaccinia virus genes are the B14R and B29R genes. In another specific embodiment, the flanking endogenous vaccinia virus genes are the B13R and B29R genes. In yet another embodiment, the second nucleotide sequence is in the same orientation as an endogenous vaccinia gene adjacent to the second nucleotide sequence. In a specific embodiment, the endogenous vaccinia gene adjacent to the second nucleotide sequence is the B13R gene. In specific embodiments, the IL-12 polypeptide is membrane-bound. In specific embodiments, the IL-12 polypeptide comprises IL-12 p35 (e.g., human IL-12 p35), IL-12 p40 (e.g., human IL-12 p40) or IL-12 p70 (e.g., human IL-12 p70). In specific embodiments, the IL-12 polypeptide is membrane-bound and comprises IL-12 p35 (e.g., human IL-12 p35), or IL-12 p70 (e.g., human IL-12 p70), and a transmembrane domain and a cytoplasmic domain (e.g., the transmembrane and cytoplasmic domains of B7-1, TNFα, or FLT3L). In specific embodiments, the IL-12 polypeptide comprises the amino acid sequence set forth in SEQ ID NO: 212. In specific embodiments, the second nucleotide sequence comprises the sequence set forth in SEQ ID NO: 215. In specific embodiments, the second nucleotide sequence is set forth in SEQ ID NO: 215.

[0303] In another aspect, provided herein is a nucleic acid comprising a recombinant vaccinia virus genome, comprising: (a) deletions in the following genes: C2L, C1L, N1L, N2L, M1L, M2L, K1L, K2L, K3L, K4L, K5L, K6L, K7R, F1L, F2L, F3L, B8R, B14R, B15R, B16R, B17L, B18R, B19R, and B20R; (b) deletions in the following genes in the 3′ ITR: B21R, B22R, B23R, B24R, B25R, B26R, B27R, B28R, and B29R; and (c) a third transgene comprising a third nucleotide sequence encoding FMS-like tyrosine kinase 3 ligand (FLT3L); wherein the deletions in the C2L, F3L, B14R, and B29R vaccinia genes are partial deletions.

[0304] In certain embodiments, the nucleic acid further comprises a nucleotide sequence comprising at least one promoter operably linked to the third nucleotide sequence. In a specific embodiment, the at least one promoter operably linked to the third nucleotide sequence is a B8R promoter, a B19R promoter, a E3L promoter, an F11L promoter, and/or a B2R promoter. In another specific embodiment, the at least one promoter operably linked to the third nucleotide sequence is a B8R promoter. In another specific embodiment, the at least one promoter operably linked to the third nucleotide sequence is a B19R promoter. In another specific embodiment, the at least one promoter operably linked to the third nucleotide sequence is a B8R promoter and a B19R promoter. In a particular embodiment, the B8R promoter comprises the nucleotide sequence of SEQ ID NO: 564. In a particular embodiment, the B19R promoter comprises the nucleotide sequence of SEQ ID NO: 565. In a particular embodiment, the E3L promoter comprises the nucleotide sequence of SEQ ID NO: 567. In a particular embodiment, the F11L promoter comprises the nucleotide sequence of SEQ ID NO: 568. In a particular embodiment, the B2R promoter comprises the nucleotide sequence of SEQ ID NO: 569.

[0305] In some embodiments, when the flanking endogenous vaccinia virus genes have the same orientation, the third nucleotide sequence is in the same orientation as the flanking endogenous vaccinia virus genes. In other embodiments, when the flanking endogenous vaccinia virus genes have the same orientation, the third nucleotide sequence is in the reverse orientation relative to the flanking endogenous vaccinia virus genes. In other embodiments, when the flanking endogenous vaccinia virus genes have opposite orientations, the third nucleotide sequence is in the same orientation as the flanking endogenous vaccinia virus gene that is closer to the 5′ end of the recombinant vaccinia virus genome. In other embodiments, when the flanking endogenous vaccinia virus genes have opposite orientations, the third nucleotide sequence is in the same orientation as the flanking endogenous vaccinia virus gene that is closer to the 3′ end of the recombinant vaccinia virus genome. In a specific embodiment, the flanking endogenous vaccinia virus genes are the C2L and F3L genes. In another specific embodiment, the flanking endogenous vaccinia virus genes are the C3L and F4L genes. In another specific embodiment, the flanking endogenous vaccinia virus genes are the B14R and B29R genes. In another specific embodiment, the flanking endogenous vaccinia virus genes are the B13R and B29R genes. In yet another embodiment, the third nucleotide sequence is in the same orientation as an endogenous vaccinia gene adjacent to the third nucleotide sequence. In a specific embodiment, the endogenous vaccinia gene adjacent to the third nucleotide sequence is the B13R gene.

[0306] In specific embodiments, the FLT3L encoded by the third nucleotide sequence is a soluble form of FLT3L. In particular embodiments, the FLT3L encoded by the third nucleotide sequence is a soluble form of human FLT3L. In certain embodiments, the FLT3L encoded by the third nucleotide sequence is a soluble form of the human FLT3L set forth in GenBank Accession No. U03858.1. For example, in specific embodiments, the FLT3L encoded by the third nucleotide sequence lacks the entire FLT3L transmembrane (e.g., the transmembrane domain of the human FLT3L set forth in GenBank Accession No. U03858.1). In other examples, the FLT3L encoded by the third nucleotide sequence lacks at least 80%, at least 85%, at least 90%, or at least 95% of the FLT3L transmembrane domain (e.g., the transmembrane domain of the human FLT3L set forth in GenBank Accession No. U03858.1). In one embodiment, the FLT3L encoded by the third nucleotide sequence lacks the entire FLT3L transmembrane domain and the entire FLT3L cytoplasmic domain. In another embodiment, the FLT3L encoded by the third nucleotide sequence lacks at least 80%, at least 85%, at least 90%, or at least 95% of the FLT3L transmembrane domain and the entire FLT3L cytoplasmic domain. In another embodiment, the FLT3L encoded by the third nucleotide sequence lacks at least 80%, at least 85%, at least 90%, or at least 95% of the FLT3L transmembrane domain and at least 25%, at least 30%, at least 40%, at least 50%, at least 60%, at least 70%, at least 80%, at least 85%, at least 90%, or at least 95% of the FLT3L cytoplasmic domain. In another embodiment, the FLT3L encoded by the third nucleotide sequence lacks the entire FLT3L transmembrane domain and 5, 6, 7, 8, 9, 10, 12, 13, 14, or 15 of the N-terminal amino acid residues of the FLT3L cytoplasmic domain. In another embodiment, the FLT3L encoded by the third nucleotide sequence lacks the entire FLT3L transmembrane domain and 1, 2, 3, or 4 of the N-terminal amino acid residues of the FLT3L cytoplasmic domain. In certain of the embodiments and aspects, the transmembrane and cytoplasmic domains are of the FLT3L sequence set forth in GenBank Accession No. U03858.1.

[0307] In another embodiment, the FLT3L encoded by the third nucleotide sequence lacks the entire FLT3L transmembrane domain and 1, 2, 3, 4, 5, 6, 7, 8, 9 or 10 amino acids from the carboxy-terminus of the FLT3L extracellular domain. In another embodiment, the FLT3L encoded by the third nucleotide sequence lacks the entire FLT3L transmembrane domain and 11, 12, 13, 14, 15, 16, 17, 18, 19 or 20 amino acids from the carboxy-terminus of the FLT3L extracellular domain. In another embodiment, the FLT3L encoded by the third nucleotide sequence lacks the entire FLT3L transmembrane domain and 1-5, 1-10, 5-10, 10-20, 15-20, 1-20, 5-20, or 10-20 amino acids from the carboxy-terminus of the FLT3L extracellular domain. In certain of the embodiments and aspects, the transmembrane and extracellular domains are of the FLT3L sequence set forth in GenBank Accession No. U03858.1.

[0308] In another embodiment, the FLT3L encoded by the third nucleotide sequence lacks at least 80%, at least 85%, at least 90%, or at least 95% of the FLT3L transmembrane domain and 1, 2, 3, 4, 5, 6, 7, 8, 9 or 10 amino acids from the carboxy-terminus of the FLT3L extracellular domain. In another embodiment, the FLT3L encoded by the third nucleotide sequence lacks at least 80%, at least 85%, at least 90%, or at least 95% of the FLT3L transmembrane domain and 11, 12, 13, 14, 15, 16, 17, 18, 19 or 20 amino acids from the carboxy-terminus of the FLT3L extracellular domain. In another embodiment, the FLT3L encoded by the third nucleotide sequence lacks at least 80%, at least 85%, at least 90%, or at least 95% of the FLT3L transmembrane domain and 1-5, 1-10, 5-10, 10-20, 15-20, 1-20, 5-20, or 10-20 amino acids from the carboxy-terminus of the FLT3L extracellular domain. In certain of the embodiments and aspects, the transmembrane and extracellular domains are of the FLT3L sequence set forth in GenBank Accession No. U03858.1.

[0309] In another embodiment, the FLT3L encoded by the third nucleotide sequence lacks the entire FLT3L transmembrane domain, the entire cytoplasmic domain, and 1, 2, 3, 4, 5, 6, 7, 8, 9 or 10 amino acids from the carboxy-terminus of the FLT3L extracellular domain. In another embodiment, the FLT3L encoded by the third nucleotide sequence lacks the entire FLT3L transmembrane domain, the entire cytoplasmic domain, and 11, 12, 13, 14, 15, 16, 17, 18, 19 or 20 amino acids from the carboxy-terminus of the FLT3L extracellular domain. In another embodiment, the FLT3L encoded by the third nucleotide sequence lacks the entire FLT3L transmembrane domain, the entire cytoplasmic domain, and 1-5, 1-10, 5-10, 10-20, 15-20, 1-20, 5-20, or 10-20 amino acids from the carboxy-terminus of the FLT3L extracellular domain. In certain of the embodiments and aspects, the transmembrane, cytoplasmic and extracellular domains are of the FLT3L sequence set forth in GenBank Accession No. U03858.1.

[0310] In another embodiment, the FLT3L encoded by the third nucleotide sequence lacks at least 25%, at least 30%, at least 40%, at least 50%, at least 60%, at least 70%, at least 80%, at least 85%, at least 90%, or at least 95% of the FLT3L transmembrane domain, the entire cytoplasmic domain, and 1, 2, 3, 4, 5, 6, 7, 8, 9 or 10 amino acids from the carboxy-terminus of the FLT3L extracellular domain. In another embodiment, the FLT3L encoded by the third nucleotide sequence lacks at least 25%, at least 30%, at least 40%, at least 50%, at least 60%, at least 70%, at least 80%, at least 85%, at least 90%, or at least 95% of the FLT3L transmembrane domain, the entire cytoplasmic domain, and 11, 12, 13, 14, 15, 16, 17, 18, 19 or 20 amino acids from the carboxy-terminus of the FLT3L extracellular domain. In another embodiment, the FLT3L encoded by the third nucleotide sequence lacks at least 25%, at least 30%, at least 40%, at least 50%, at least 60%, at least 70%, at least 80%, at least 85%, at least 90%, or at least 95% of the FLT3L transmembrane domain, the entire cytoplasmic domain, and 1-5, 1-10, 5-10, 10-20, 15-20, 1-20, 5-20, or 10-20 amino acids from the carboxy-terminus of the FLT3L extracellular domain. In certain of the embodiments and aspects, the transmembrane, cytoplasmic and extracellular domains are of the FLT3L sequence set forth in GenBank Accession No. U03858.1.

[0311] In another embodiment, the FLT3L encoded by the third nucleotide sequence lacks the entire FLT3L transmembrane domain, at least 25%, at least 30%, at least 40%, at least 50%, at least 60%, at least 70%, at least 80%, at least 85%, at least 90%, or at least 95% of the cytoplasmic domain, and 1, 2, 3, 4, 5, 6, 7, 8, 9 or 10 amino acids from the carboxy-terminus of the FLT3L extracellular domain. In another embodiment, the FLT3L encoded by the third nucleotide sequence lacks the entire FLT3L transmembrane domain, at least 25%, at least 30%, at least 40%, at least 50%, at least 60%, at least 70%, at least 80%, at least 85%, at least 90%, or at least 95% of the cytoplasmic domain, and 11, 12, 13, 14, 15, 16, 17, 18, 19 or 20 amino acids from the carboxy-terminus of the FLT3L extracellular domain. In another embodiment, the FLT3L encoded by the third nucleotide sequence lacks the entire FLT3L transmembrane domain, at least 25%, at least 30%, at least 40%, at least 50%, at least 60%, at least 70%, at least 80%, at least 85%, at least 90%, or at least 95% of the cytoplasmic domain, and 1-5, 1-10, 5-10, 10-20, 15-20, 1-20, 5-20, or 10-20 amino acids from the carboxy-terminus of the FLT3L extracellular domain. In certain of the embodiments and aspects, the transmembrane, cytoplasmic and extracellular domains are of the FLT3L sequence set forth in GenBank Accession No. U03858.1.

[0312] In another embodiment, the FLT3L encoded by the third nucleotide sequence lacks at least 80%, at least 85%, at least 90%, or at least 95% of the FLT3L transmembrane domain, at least 25%, at least 30%, at least 40%, at least 50%, at least 60%, at least 70%, at least 80%, at least 85%, at least 90%, or at least 95% of the cytoplasmic domain, and 1, 2, 3, 4, 5, 6, 7, 8, 9 or 10 amino acids from the carboxy-terminus of the FLT3L extracellular domain. In another embodiment, the FLT3L encoded by the third nucleotide sequence lacks at least 80%, at least 85%, at least 90%, or at least 95% of the FLT3L transmembrane domain, at least 25%, at least 30%, at least 40%, at least 50%, at least 60%, at least 70%, at least 80%, at least 85%, at least 90%, or at least 95% of the cytoplasmic domain, and 11, 12, 13, 14, 15, 16, 17, 18, 19 or 20 amino acids from the carboxy-terminus of the FLT3L extracellular domain. In another embodiment, the FLT3L encoded by the third nucleotide sequence lacks at least 80%, at least 85%, at least 90%, or at least 95% of the FLT3L transmembrane domain, at least 25%, at least 30%, at least 40%, at least 50%, at least 60%, at least 70%, at least 80%, at least 85%, at least 90%, or at least 95% of the cytoplasmic domain, and 1-5, 1-10, 5-10, 10-20, 15-20, 1-20, 5-20, or 10-20 amino acids from the carboxy-terminus of the FLT3L extracellular domain. In certain of the embodiments and aspects, the transmembrane, cytoplasmic and extracellular domains are of the FLT3L sequence set forth in GenBank Accession No. U03858.1.

[0313] In another embodiment, the FLT3L encoded by the third nucleotide sequence lacks the entire FLT3L transmembrane domain, 1, 2, 3, 4, 5, 6, 7, 8, 9, 10, 12, 13, 14, or 15 of the N-terminal amino acid residues of the cytoplasmic domain, and 1, 2, 3, 4, 5, 6, 7, 8, 9 or 10 amino acids from the carboxy-terminus of the FLT3L extracellular domain. In another embodiment, the FLT3L encoded by the third nucleotide sequence lacks the entire FLT3L transmembrane domain, 1, 2, 3, 4, 5, 6, 7, 8, 9, 10, 12, 13, 14, or 15 of the N-terminal amino acid residues of the cytoplasmic domain, and 11, 12, 13, 14, 15, 16, 17, 18, 19 or 20 amino acids from the carboxy-terminus of the FLT3L extracellular domain. In another embodiment, the FLT3L encoded by the third nucleotide sequence lacks the entire FLT3L transmembrane domain, 1, 2, 3, 4, 5, 6, 7, 8, 9, 10, 12, 13, 14, or 15 of the N-terminal amino acid residues of the cytoplasmic domain, and 1-5, 1-10, 5-10, 10-20, 15-20, 1-20, 5-20, or 10-20 amino acids from the carboxy-terminus of the FLT3L extracellular domain. In certain of the embodiments and aspects, the transmembrane, cytoplasmic and extracellular domains are of the FLT3L sequence set forth in GenBank Accession No. U03858.1.

[0314] In another embodiment, the FLT3L encoded by the third nucleotide sequence lacks at least 80%, at least 85%, at least 90%, or at least 95% of the FLT3L transmembrane domain, 1, 2, 3, 4, 5, 6, 7, 8, 9, 10, 12, 13, 14, or 15 of the N-terminal amino acid residues of the cytoplasmic domain, and 1, 2, 3, 4, 5, 6, 7, 8, 9 or 10 amino acids from the carboxy-terminus of the FLT3L extracellular domain. In another embodiment, the FLT3L encoded by the third nucleotide sequence lacks at least 80%, at least 85%, at least 90%, or at least 95% of the FLT3L transmembrane domain, 1, 2, 3, 4, 5, 6, 7, 8, 9, 10, 12, 13, 14, or 15 of the N-terminal amino acid residues of the cytoplasmic domain, and 11, 12, 13, 14, 15, 16, 17, 18, 19 or 20 amino acids from the carboxy-terminus of the FLT3L extracellular domain. In another embodiment, the FLT3L encoded by the third nucleotide sequence lacks at least 80%, at least 85%, at least 90%, or at least 95% of the FLT3L transmembrane domain, 1, 2, 3, 4, 5, 6, 7, 8, 9, 10, 12, 13, 14, or 15 of the N-terminal amino acid residues of the cytoplasmic domain, and 1-5, 1-10, 5-10, 10-20, 15-20, 1-20, 5-20, or 10-20 amino acids from the carboxy-terminus of the FLT3L extracellular domain. In certain of the embodiments and aspects, the transmembrane, cytoplasmic and extracellular domains are of the FLT3L sequence set forth in GenBank Accession No. U03858.1.

[0315] In a specific embodiment, the FLT3L encoded by the third nucleotide sequence is an X7 isoform and the third nucleotide sequence lacks a 179-nucleotide sequence as described in Lyman et al., 1994, Blood 83:2795-2801. In specific embodiments, the FLT3L comprises the amino acid sequence set forth in SEQ ID NO: 213. In specific embodiments, the third nucleotide sequence comprises the sequence set forth in SEQ ID NO: 216. In specific embodiments, the third nucleotide sequence is set forth in SEQ ID NO: 216.

[0316] In another aspect, provided herein is a nucleic acid comprising a recombinant vaccinia virus genome, comprising: (a) deletions in the following genes: C2L, C1L, N1L, N2L, M1L, M2L, K1L, K2L, K3L, K4L, K5L, K6L, K7R, F1L, F2L, F3L, B14R, B15R, B16R, B17L, B18R, B19R, and B20R; (b) deletions in the following genes in the 3′ ITR: B21R, B22R, B23R, B24R, B25R, B26R, B27R, B28R, and B29R; (c) a third transgene comprising a third nucleotide sequence encoding FLT3L; and (d) a nucleotide sequence comprising at least one promoter operably linked to the third nucleotide sequence, wherein the at least one promoter operably linked to the third nucleotide sequence is a B8R promoter, a B 19R promoter, a E3L promoter, an F11L promoter, and/or a B2R promoter; wherein the deletions in the C2L, F3L, B14R, and B29R vaccinia genes are partial deletions. In specific embodiments, the nucleic acid further comprises a deletion in the B8R gene. In a particular embodiment, the B8R promoter comprises the nucleotide sequence of SEQ ID NO: 564. In a particular embodiment, the B19R promoter comprises the nucleotide sequence of SEQ ID NO: 565. In a particular embodiment, the E3L promoter comprises the nucleotide sequence of SEQ ID NO: 567. In a particular embodiment, the F11L promoter comprises the nucleotide sequence of SEQ ID NO: 568. In a particular embodiment, the B2R promoter comprises the nucleotide sequence of SEQ ID NO: 569.

[0317] In certain embodiments, the at least one promoter operably linked to the third nucleotide sequence is a B8R promoter. In certain embodiments, the at least one promoter operably linked to the third nucleotide sequence is a B19R promoter. In certain embodiments, the at least one promoter operably linked to the third nucleotide sequence is a B8R promoter and a B19R promoter. In a particular embodiment, the B8R promoter comprises the nucleotide sequence of SEQ ID NO: 564. In a particular embodiment, the B19R promoter comprises the nucleotide sequence of SEQ ID NO: 565.

[0318] In some embodiments, when the flanking endogenous vaccinia virus genes have the same orientation, the third nucleotide sequence is in the same orientation as the flanking endogenous vaccinia virus genes. In other embodiments, when the flanking endogenous vaccinia virus genes have the same orientation, the third nucleotide sequence is in the reverse orientation relative to the flanking endogenous vaccinia virus genes. In other embodiments, when the flanking endogenous vaccinia virus genes have opposite orientations, the third nucleotide sequence is in the same orientation as the flanking endogenous vaccinia virus gene that is closer to the 5′ end of the recombinant vaccinia virus genome. In other embodiments, when the flanking endogenous vaccinia virus genes have opposite orientations, the third nucleotide sequence is in the same orientation as the flanking endogenous vaccinia virus gene that is closer to the 3′ end of the recombinant vaccinia virus genome. In a specific embodiment, the flanking endogenous vaccinia virus genes are the C2L and F3L genes. In another specific embodiment, the flanking endogenous vaccinia virus genes are the C3L and F4L genes. In another specific embodiment, the flanking endogenous vaccinia virus genes are the B14R and B29R genes. In another specific embodiment, the flanking endogenous vaccinia virus genes are the B13R and B29R genes. In yet another embodiment, the third nucleotide sequence is in the same orientation as an endogenous vaccinia gene adjacent to the third nucleotide sequence. In a specific embodiment, the endogenous vaccinia gene adjacent to the third nucleotide sequence is the B13R gene.

[0319] In specific embodiments, the FLT3L encoded by the third nucleotide sequence is a soluble form of FLT3L. In particular embodiments, the FLT3L encoded by the third nucleotide sequence is a soluble form of human FLT3L. In certain embodiments, the FLT3L encoded by the third nucleotide sequence is a soluble form of the human FLT3L set forth in GenBank Accession No. U03858.1. For example, in specific embodiments, the FLT3L encoded by the third nucleotide sequence lacks the entire FLT3L transmembrane (e.g., the transmembrane domain of the human FLT3L set forth in GenBank Accession No. U03858.1). In other examples, the FLT3L encoded by the third nucleotide sequence lacks at least 80%, at least 85%, at least 90%, or at least 95% of the FLT3L transmembrane domain (e.g., the transmembrane domain of the human FLT3L set forth in GenBank Accession No. U03858.1). In one embodiment, the FLT3L encoded by the third nucleotide sequence lacks the entire FLT3L transmembrane domain and the entire FLT3L cytoplasmic domain. In another embodiment, the FLT3L encoded by the third nucleotide sequence lacks at least 80%, at least 85%, at least 90%, or at least 95% of the FLT3L transmembrane domain and the entire FLT3L cytoplasmic domain. In another embodiment, the FLT3L encoded by the third nucleotide sequence lacks at least 80%, at least 85%, at least 90%, or at least 95% of the FLT3L transmembrane domain and at least 25%, at least 30%, at least 40%, at least 50%, at least 60%, at least 70%, at least 80%, at least 85%, at least 90%, or at least 95% of the FLT3L cytoplasmic domain. In another embodiment, the FLT3L encoded by the third nucleotide sequence lacks the entire FLT3L transmembrane domain and 5, 6, 7, 8, 9, 10, 12, 13, 14, or 15 of the N-terminal amino acid residues of the FLT3L cytoplasmic domain. In another embodiment, the FLT3L encoded by the third nucleotide sequence lacks the entire FLT3L transmembrane domain and 1, 2, 3, or 4 of the N-terminal amino acid residues of the FLT3L cytoplasmic domain. In certain of the embodiments and aspects, the transmembrane and cytoplasmic domains are of the FLT3L sequence set forth in GenBank Accession No. U03858.1.

[0320] In another embodiment, the FLT3L encoded by the third nucleotide sequence lacks the entire FLT3L transmembrane domain and 1, 2, 3, 4, 5, 6, 7, 8, 9 or 10 amino acids from the carboxy-terminus of the FLT3L extracellular domain. In another embodiment, the FLT3L encoded by the third nucleotide sequence lacks the entire FLT3L transmembrane domain and 11, 12, 13, 14, 15, 16, 17, 18, 19 or 20 amino acids from the carboxy-terminus of the FLT3L extracellular domain. In another embodiment, the FLT3L encoded by the third nucleotide sequence lacks the entire FLT3L transmembrane domain and 1-5, 1-10, 5-10, 10-20, 15-20, 1-20, 5-20, or 10-20 amino acids from the carboxy-terminus of the FLT3L extracellular domain. In certain of the embodiments and aspects, the transmembrane and extracellular domains are of the FLT3L sequence set forth in GenBank Accession No. U03858.1.

[0321] In another embodiment, the FLT3L encoded by the third nucleotide sequence lacks at least 80%, at least 85%, at least 90%, or at least 95% of the FLT3L transmembrane domain and 1, 2, 3, 4, 5, 6, 7, 8, 9 or 10 amino acids from the carboxy-terminus of the FLT3L extracellular domain. In another embodiment, the FLT3L encoded by the third nucleotide sequence lacks at least 80%, at least 85%, at least 90%, or at least 95% of the FLT3L transmembrane domain and 11, 12, 13, 14, 15, 16, 17, 18, 19 or 20 amino acids from the carboxy-terminus of the FLT3L extracellular domain. In another embodiment, the FLT3L encoded by the third nucleotide sequence lacks at least 80%, at least 85%, at least 90%, or at least 95% of the FLT3L transmembrane domain and 1-5, 1-10, 5-10, 10-20, 15-20, 1-20, 5-20, or 10-20 amino acids from the carboxy-terminus of the FLT3L extracellular domain. In certain of the embodiments and aspects, the transmembrane and extracellular domains are of the FLT3L sequence set forth in GenBank Accession No. U03858.1.

[0322] In another embodiment, the FLT3L encoded by the third nucleotide sequence lacks the entire FLT3L transmembrane domain, the entire cytoplasmic domain, and 1, 2, 3, 4, 5, 6, 7, 8, 9 or 10 amino acids from the carboxy-terminus of the FLT3L extracellular domain. In another embodiment, the FLT3L encoded by the third nucleotide sequence lacks the entire FLT3L transmembrane domain, the entire cytoplasmic domain, and 11, 12, 13, 14, 15, 16, 17, 18, 19 or 20 amino acids from the carboxy-terminus of the FLT3L extracellular domain. In another embodiment, the FLT3L encoded by the third nucleotide sequence lacks the entire FLT3L transmembrane domain, the entire cytoplasmic domain, and 1-5, 1-10, 5-10, 10-20, 15-20, 1-20, 5-20, or 10-20 amino acids from the carboxy-terminus of the FLT3L extracellular domain. In certain of the embodiments and aspects, the transmembrane, cytoplasmic and extracellular domains are of the FLT3L sequence set forth in GenBank Accession No. U03858.1.

[0323] In another embodiment, the FLT3L encoded by the third nucleotide sequence lacks at least 25%, at least 30%, at least 40%, at least 50%, at least 60%, at least 70%, at least 80%, at least 85%, at least 90%, or at least 95% of the FLT3L transmembrane domain, the entire cytoplasmic domain, and 1, 2, 3, 4, 5, 6, 7, 8, 9 or 10 amino acids from the carboxy-terminus of the FLT3L extracellular domain. In another embodiment, the FLT3L encoded by the third nucleotide sequence lacks at least 25%, at least 30%, at least 40%, at least 50%, at least 60%, at least 70%, at least 80%, at least 85%, at least 90%, or at least 95% of the FLT3L transmembrane domain, the entire cytoplasmic domain, and 11, 12, 13, 14, 15, 16, 17, 18, 19 or 20 amino acids from the carboxy-terminus of the FLT3L extracellular domain. In another embodiment, the FLT3L encoded by the third nucleotide sequence lacks at least 25%, at least 30%, at least 40%, at least 50%, at least 60%, at least 70%, at least 80%, at least 85%, at least 90%, or at least 95% of the FLT3L transmembrane domain, the entire cytoplasmic domain, and 1-5, 1-10, 5-10, 10-20, 15-20, 1-20, 5-20, or 10-20 amino acids from the carboxy-terminus of the FLT3L extracellular domain. In certain of the embodiments and aspects, the transmembrane, cytoplasmic and extracellular domains are of the FLT3L sequence set forth in GenBank Accession No. U03858.1.

[0324] In another embodiment, the FLT3L encoded by the third nucleotide sequence lacks the entire FLT3L transmembrane domain, at least 25%, at least 30%, at least 40%, at least 50%, at least 60%, at least 70%, at least 80%, at least 85%, at least 90%, or at least 95% of the cytoplasmic domain, and 1, 2, 3, 4, 5, 6, 7, 8, 9 or 10 amino acids from the carboxy-terminus of the FLT3L extracellular domain. In another embodiment, the FLT3L encoded by the third nucleotide sequence lacks the entire FLT3L transmembrane domain, at least 25%, at least 30%, at least 40%, at least 50%, at least 60%, at least 70%, at least 80%, at least 85%, at least 90%, or at least 95% of the cytoplasmic domain, and 11, 12, 13, 14, 15, 16, 17, 18, 19 or 20 amino acids from the carboxy-terminus of the FLT3L extracellular domain. In another embodiment, the FLT3L encoded by the third nucleotide sequence lacks the entire FLT3L transmembrane domain, at least 25%, at least 30%, at least 40%, at least 50%, at least 60%, at least 70%, at least 80%, at least 85%, at least 90%, or at least 95% of the cytoplasmic domain, and 1-5, 1-10, 5-10, 10-20, 15-20, 1-20, 5-20, or 10-20 amino acids from the carboxy-terminus of the FLT3L extracellular domain. In certain of the embodiments and aspects, the transmembrane, cytoplasmic and extracellular domains are of the FLT3L sequence set forth in GenBank Accession No. U03858.1.

[0325] In another embodiment, the FLT3L encoded by the third nucleotide sequence lacks at least 80%, at least 85%, at least 90%, or at least 95% of the FLT3L transmembrane domain, at least 25%, at least 30%, at least 40%, at least 50%, at least 60%, at least 70%, at least 80%, at least 85%, at least 90%, or at least 95% of the cytoplasmic domain, and 1, 2, 3, 4, 5, 6, 7, 8, 9 or 10 amino acids from the carboxy-terminus of the FLT3L extracellular domain. In another embodiment, the FLT3L encoded by the third nucleotide sequence lacks at least 80%, at least 85%, at least 90%, or at least 95% of the FLT3L transmembrane domain, at least 25%, at least 30%, at least 40%, at least 50%, at least 60%, at least 70%, at least 80%, at least 85%, at least 90%, or at least 95% of the cytoplasmic domain, and 11, 12, 13, 14, 15, 16, 17, 18, 19 or 20 amino acids from the carboxy-terminus of the FLT3L extracellular domain. In another embodiment, the FLT3L encoded by the third nucleotide sequence lacks at least 80%, at least 85%, at least 90%, or at least 95% of the FLT3L transmembrane domain, at least 25%, at least 30%, at least 40%, at least 50%, at least 60%, at least 70%, at least 80%, at least 85%, at least 90%, or at least 95% of the cytoplasmic domain, and 1-5, 1-10, 5-10, 10-20, 15-20, 1-20, 5-20, or 10-20 amino acids from the carboxy-terminus of the FLT3L extracellular domain. In certain of the embodiments and aspects, the transmembrane, cytoplasmic and extracellular domains are of the FLT3L sequence set forth in GenBank Accession No. U03858.1.

[0326] In another embodiment, the FLT3L encoded by the third nucleotide sequence lacks the entire FLT3L transmembrane domain, 1, 2, 3, 4, 5, 6, 7, 8, 9, 10, 12, 13, 14, or 15 of the N-terminal amino acid residues of the cytoplasmic domain, and 1, 2, 3, 4, 5, 6, 7, 8, 9 or 10 amino acids from the carboxy-terminus of the FLT3L extracellular domain. In another embodiment, the FLT3L encoded by the third nucleotide sequence lacks the entire FLT3L transmembrane domain, 1, 2, 3, 4, 5, 6, 7, 8, 9, 10, 12, 13, 14, or 15 of the N-terminal amino acid residues of the cytoplasmic domain, and 11, 12, 13, 14, 15, 16, 17, 18, 19 or 20 amino acids from the carboxy-terminus of the FLT3L extracellular domain. In another embodiment, the FLT3L encoded by the third nucleotide sequence lacks the entire FLT3L transmembrane domain, 1, 2, 3, 4, 5, 6, 7, 8, 9, 10, 12, 13, 14, or 15 of the N-terminal amino acid residues of the cytoplasmic domain, and 1-5, 1-10, 5-10, 10-20, 15-20, 1-20, 5-20, or 10-20 amino acids from the carboxy-terminus of the FLT3L extracellular domain. In certain of the embodiments and aspects, the transmembrane, cytoplasmic and extracellular domains are of the FLT3L sequence set forth in GenBank Accession No. U03858.1.

[0327] In another embodiment, the FLT3L encoded by the third nucleotide sequence lacks at least 80%, at least 85%, at least 90%, or at least 95% of the FLT3L transmembrane domain, 1, 2, 3, 4, 5, 6, 7, 8, 9, 10, 12, 13, 14, or 15 of the N-terminal amino acid residues of the cytoplasmic domain, and 1, 2, 3, 4, 5, 6, 7, 8, 9 or 10 amino acids from the carboxy-terminus of the FLT3L extracellular domain. In another embodiment, the FLT3L encoded by the third nucleotide sequence lacks at least 80%, at least 85%, at least 90%, or at least 95% of the FLT3L transmembrane domain, 1, 2, 3, 4, 5, 6, 7, 8, 9, 10, 12, 13, 14, or 15 of the N-terminal amino acid residues of the cytoplasmic domain, and 11, 12, 13, 14, 15, 16, 17, 18, 19 or 20 amino acids from the carboxy-terminus of the FLT3L extracellular domain. In another embodiment, the FLT3L encoded by the third nucleotide sequence lacks at least 80%, at least 85%, at least 90%, or at least 95% of the FLT3L transmembrane domain, 1, 2, 3, 4, 5, 6, 7, 8, 9, 10, 12, 13, 14, or 15 of the N-terminal amino acid residues of the cytoplasmic domain, and 1-5, 1-10, 5-10, 10-20, 15-20, 1-20, 5-20, or 10-20 amino acids from the carboxy-terminus of the FLT3L extracellular domain. In certain of the embodiments and aspects, the transmembrane, cytoplasmic and extracellular domains are of the FLT3L sequence set forth in GenBank Accession No. U03858.1.

[0328] In a specific embodiment, the FLT3L encoded by the third nucleotide sequence is an X7 isoform and the third nucleotide sequence lacks a 179-nucleotide sequence as described in Lyman et al., 1994, Blood 83:2795-2801. In specific embodiments, the FLT3L comprises the amino acid sequence set forth in SEQ ID NO: 213. In specific embodiments, the third nucleotide sequence comprises the sequence set forth in SEQ ID NO: 216. In specific embodiments, the third nucleotide sequence is set forth in SEQ ID NO: 216.

[0329] In another aspect, provided herein is a nucleic acid comprising a recombinant vaccinia virus genome, comprising: (a) deletions in the following genes: C2L, C1L, N1L, N2L, M1L, M2L, K1L, K2L, K3L, K4L, K5L, K6L, K7R, F1L, F2L, F3L, B8R, B14R, B15R, B16R, B17L, B18R, B19R, and B20R; (b) deletions in the following genes in the 3′ ITR: B21R, B22R, B23R, B24R, B25R, B26R, B27R, B28R, and B29R; (c) a first transgene comprising a first nucleotide sequence encoding an antibody or antigen-binding fragment thereof that specifically binds to CTLA-4 (e.g., human CTLA-4); and (d) a second transgene comprising a second nucleotide sequence encoding an IL-12 polypeptide; wherein the deletions in the C2L, F3L, B14R, and B29R vaccinia genes are partial deletions.

[0330] In certain embodiments, the nucleic acid further comprises a nucleotide sequence comprising at least one promoter operably linked to the first nucleotide sequence. In a specific embodiment, the at least one promoter operably linked to the first nucleotide sequence is an H5R promoter, a pS promoter, or a LEO promoter. In another specific embodiment, the at least one promoter operably linked to the first nucleotide sequence is an H5R promoter (e.g., an early H5R promoter, a late H5R promoter, or an early H5R promoter and a late H5R promoter).

[0331] In certain embodiments, the nucleic acid further comprises a nucleotide sequence comprising at least one promoter operably linked to the second nucleotide sequence. In a specific embodiment, the at least one promoter operably linked to the second nucleotide sequence is a late promoter. In a further specific embodiment, the late promoter comprises the nucleotide sequence of SEQ ID NO: 561, an F17R promoter, or a D13L promoter. In another further specific embodiment, the late promoter comprises the nucleotide sequence of SEQ ID NO: 561. In another embodiment, the F17R promoter comprises the nucleotide sequence of SEQ ID NO:563. In yet another embodiment, the D13L promoter comprises the nucleotide sequence of SEQ ID NO:562.

[0332] In some embodiments, when the flanking endogenous vaccinia virus genes of the first nucleotide sequence have the same orientation, the first nucleotide sequence is in the same orientation as the flanking endogenous vaccinia virus genes. In other embodiments, when the flanking endogenous vaccinia virus genes of the first nucleotide sequence have the same orientation, the first nucleotide sequence is in the reverse orientation relative to the flanking endogenous vaccinia virus genes. In other embodiments, when the flanking endogenous vaccinia virus genes of the first nucleotide sequence have opposite orientations, the first nucleotide sequence is in the same orientation as the flanking endogenous vaccinia virus gene that is closer to the 5′ end of the recombinant vaccinia virus genome. In other embodiments, when the flanking endogenous vaccinia virus genes of the first nucleotide sequence have opposite orientations, the first nucleotide sequence is in the same orientation as the flanking endogenous vaccinia virus gene that is closer to the 3′ end of the recombinant vaccinia virus genome. In a specific embodiment, the flanking endogenous vaccinia virus genes of the first nucleotide sequence are the C2L and F3L genes. In another specific embodiment, the flanking endogenous vaccinia virus genes of the first nucleotide sequence are the C3L and F4L genes. In another specific embodiment, the flanking endogenous vaccinia virus genes of the first nucleotide sequence are the B14R and B29R genes. In another specific embodiment, the flanking endogenous vaccinia virus genes of the first nucleotide sequence are the B13R and B29R genes. In yet another embodiment, the first nucleotide sequence is in the same orientation as an endogenous vaccinia gene adjacent to the first nucleotide sequence. In a specific embodiment, the endogenous vaccinia gene adjacent to the first nucleotide sequence is the B13R gene. In some embodiments, when the flanking endogenous vaccinia virus genes of the second nucleotide sequence have the same orientation, the second nucleotide sequence is in the same orientation as the flanking endogenous vaccinia virus genes. In other embodiments, when the flanking endogenous vaccinia virus genes of the second nucleotide sequence have the same orientation, the second nucleotide sequence is in the reverse orientation relative to the flanking endogenous vaccinia virus genes. In other embodiments, when the flanking endogenous vaccinia virus genes of the second nucleotide sequence have opposite orientations, the second nucleotide sequence is in the same orientation as the flanking endogenous vaccinia virus gene that is closer to the 5′ end of the recombinant vaccinia virus genome. In other embodiments, when the flanking endogenous vaccinia virus genes of the second nucleotide sequence have opposite orientations, the second nucleotide sequence is in the same orientation as the flanking endogenous vaccinia virus gene that is closer to the 3′ end of the recombinant vaccinia virus genome. In a specific embodiment, the flanking endogenous vaccinia virus genes of the second nucleotide sequence are the C2L and F3L genes. In another specific embodiment, the flanking endogenous vaccinia virus genes of the second nucleotide sequence are the C3L and F4L genes. In another specific embodiment, the flanking endogenous vaccinia virus genes of the second nucleotide sequence are the B14R and B29R genes. In another specific embodiment, the flanking endogenous vaccinia virus genes of the second nucleotide sequence are the B13R and B29R genes. In yet another embodiment, the second nucleotide sequence is in the same orientation as an endogenous vaccinia gene adjacent to the second nucleotide sequence. In a specific embodiment, the endogenous vaccinia gene adjacent to the second nucleotide sequence is the B13R gene.

[0333] In specific embodiments, the anti-CTLA-4 antibody or antigen-binding fragment thereof encoded by the first nucleotide sequence comprises the 6 complementarily-determining regions (CDRs) of ipilimumab. In specific embodiments, the first nucleotide sequence encodes an amino acid sequence comprising the amino acid sequence set forth in SEQ ID NO: 211. In specific embodiments, the first nucleotide sequence comprises the sequence set forth in SEQ ID NO: 214. In specific embodiments, the first nucleotide sequence is set forth in SEQ ID NO: 214.

[0334] In specific embodiments, the IL-12 polypeptide is membrane-bound. In specific embodiments, the IL-12 polypeptide comprises IL-12 p35 (e.g., human IL-12 p35), IL-12 p40 (e.g., human IL-12 p40) or IL-12 p70 (e.g., human IL-12 p70). In specific embodiments, the IL-12 polypeptide is membrane-bound and comprises IL-12 p35 (e.g., human IL-12 p35), or IL-12 p70 (e.g., human IL-12 p70), and a transmembrane domain and a cytoplasmic domain (e.g., the transmembrane and cytoplasmic domains of B7-1, TNFα, or FLT3L). In specific embodiments, the IL-12 polypeptide comprises the amino acid sequence set forth in SEQ ID NO: 212. In specific embodiments, the second nucleotide sequence comprises the sequence set forth in SEQ ID NO: 215. In specific embodiments, the second nucleotide sequence is set forth in SEQ ID NO: 215.

[0335] In another aspect, provided herein is a nucleic acid comprising a recombinant vaccinia virus genome, comprising: (a) deletions in the following genes: C2L, C1L, N1L, N2L, M1L, M2L, K1L, K2L, K3L, K4L, K5L, K6L, K7R, F1L, F2L, F3L, B14R, B15R, B16R, B17L, B18R, B19R, and B20R; (b) deletions in the following genes in the 3′ ITR: B21R, B22R, B23R, B24R, B25R, B26R, B27R, B28R, and B29R; (c) a first transgene comprising a first nucleotide sequence encoding an antibody or antigen-binding fragment thereof that specifically binds to CTLA-4 (e.g., human CTLA-4); and (d) a second transgene comprising a second nucleotide sequence encoding an IL-12 polypeptide; wherein the deletions in the C2L, F3L, B14R, and B29R vaccinia genes are partial deletions; and wherein the nucleic acid further comprises: (i) a nucleotide sequence comprising at least one promoter operably linked to the first nucleotide sequence, wherein the at least one promoter operably linked to the first nucleotide sequence is an H5R promoter, a pS promoter, or a LEO promoter; and/or (ii) a nucleotide sequence comprising at least one promoter operably linked to the second nucleotide sequence, wherein the at least one promoter operably linked to the second nucleotide sequence is a late promoter. In specific embodiments, the nucleic acid further comprises a deletion in the B8R gene.

[0336] In certain embodiments, the at least one promoter operably linked to the first nucleotide sequence is an H5R promoter (e.g., an early H5R promoter, a late H5R promoter, or an early H5R promoter and a late H5R promoter). In certain embodiments, the late promoter comprises the nucleotide sequence of SEQ ID NO: 561, an F17R promoter, or a D13L promoter. In a specific embodiment, the late promoter comprises the nucleotide sequence of SEQ ID NO: 561. In another embodiment, the F17R promoter comprises the nucleotide sequence of SEQ ID NO:563. In yet another embodiment, the D13L promoter comprises the nucleotide sequence of SEQ ID NO:562.

[0337] In some embodiments, when the flanking endogenous vaccinia virus genes of the first nucleotide sequence have the same orientation, the first nucleotide sequence is in the same orientation as the flanking endogenous vaccinia virus genes. In other embodiments, when the flanking endogenous vaccinia virus genes of the first nucleotide sequence have the same orientation, the first nucleotide sequence is in the reverse orientation relative to the flanking endogenous vaccinia virus genes. In other embodiments, when the flanking endogenous vaccinia virus genes of the first nucleotide sequence have opposite orientations, the first nucleotide sequence is in the same orientation as the flanking endogenous vaccinia virus gene that is closer to the 5′ end of the recombinant vaccinia virus genome. In other embodiments, when the flanking endogenous vaccinia virus genes of the first nucleotide sequence have opposite orientations, the first nucleotide sequence is in the same orientation as the flanking endogenous vaccinia virus gene that is closer to the 3′ end of the recombinant vaccinia virus genome. In a specific embodiment, the flanking endogenous vaccinia virus genes of the first nucleotide sequence are the C2L and F3L genes. In another specific embodiment, the flanking endogenous vaccinia virus genes of the first nucleotide sequence are the C3L and F4L genes. In another specific embodiment, the flanking endogenous vaccinia virus genes of the first nucleotide sequence are the B14R and B29R genes. In another specific embodiment, the flanking endogenous vaccinia virus genes of the first nucleotide sequence are the B13R and B29R genes. In yet another embodiment, the first nucleotide sequence is in the same orientation as an endogenous vaccinia gene adjacent to the first nucleotide sequence. In a specific embodiment, the endogenous vaccinia gene adjacent to the first nucleotide sequence is the B13R gene. In some embodiments, when the flanking endogenous vaccinia virus genes of the second nucleotide sequence have the same orientation, the second nucleotide sequence is in the same orientation as the flanking endogenous vaccinia virus genes. In other embodiments, when the flanking endogenous vaccinia virus genes of the second nucleotide sequence have the same orientation, the second nucleotide sequence is in the reverse orientation relative to the flanking endogenous vaccinia virus genes. In other embodiments, when the flanking endogenous vaccinia virus genes of the second nucleotide sequence have opposite orientations, the second nucleotide sequence is in the same orientation as the flanking endogenous vaccinia virus gene that is closer to the 5′ end of the recombinant vaccinia virus genome. In other embodiments, when the flanking endogenous vaccinia virus genes of the second nucleotide sequence have opposite orientations, the second nucleotide sequence is in the same orientation as the flanking endogenous vaccinia virus gene that is closer to the 3′ end of the recombinant vaccinia virus genome. In a specific embodiment, the flanking endogenous vaccinia virus genes of the second nucleotide sequence are the C2L and F3L genes. In another specific embodiment, the flanking endogenous vaccinia virus genes of the second nucleotide sequence are the C3L and F4L genes. In another specific embodiment, the flanking endogenous vaccinia virus genes of the second nucleotide sequence are the B14R and B29R genes. In another specific embodiment, the flanking endogenous vaccinia virus genes of the second nucleotide sequence are the B13R and B29R genes. In yet another embodiment, the second nucleotide sequence is in the same orientation as an endogenous vaccinia gene adjacent to the second nucleotide sequence. In a specific embodiment, the endogenous vaccinia gene adjacent to the second nucleotide sequence is the B13R gene.

[0338] In specific embodiments, the anti-CTLA-4 antibody or antigen-binding fragment thereof encoded by the first nucleotide sequence comprises the 6 complementarity-determining regions (CDRs) of ipilimumab. In specific embodiments, the first nucleotide sequence encodes an amino acid sequence comprising the amino acid sequence set forth in SEQ ID NO: 211. In specific embodiments, the first nucleotide sequence comprises the sequence set forth in SEQ ID NO: 214. In specific embodiments, the first nucleotide sequence is set forth in SEQ ID NO: 214.

[0339] In specific embodiments, the IL-12 polypeptide is membrane-bound. In specific embodiments, the IL-12 polypeptide comprises IL-12 p35 (e.g., human IL-12 p35), IL-12 p40 (e.g., human IL-12 p40) or IL-12 p70 (e.g., human IL-12 p70). In specific embodiments, the IL-12 polypeptide is membrane-bound and comprises IL-12 p35 (e.g., human IL-12 p35), or IL-12 p70 (e.g., human IL-12 p70), and a transmembrane domain and a cytoplasmic domain (e.g., the transmembrane and cytoplasmic domains of B7-1, TNFα, or FLT3L). In specific embodiments, the IL-12 polypeptide comprises the amino acid sequence set forth in SEQ ID NO: 212. In specific embodiments, the second nucleotide sequence comprises the sequence set forth in SEQ ID NO: 215. In specific embodiments, the second nucleotide sequence is set forth in SEQ ID NO: 215.

[0340] In another aspect, provided herein is a nucleic acid comprising a recombinant vaccinia virus genome, comprising: (a) deletions in the following genes: C2L, C1L, N1L, N2L, M1L, M2L, K1L, K2L, K3L, K4L, K5L, K6L, K7R, F1L, F2L, F3L, B8R, B14R, B15R, B16R, B17L, B18R, B19R, and B20R; (b) deletions in the following genes in the 3′ ITR: B21R, B22R, B23R, B24R, B25R, B26R, B27R, B28R, and B29R; (c) a first transgene comprising a first nucleotide sequence encoding an antibody or antigen-binding fragment thereof that specifically binds to CTLA-4 (e.g., human CTLA-4); and (d) a third transgene comprising a third nucleotide sequence encoding FLT3L; wherein the deletions in the C2L, F3L, B14R, and B29R vaccinia genes are partial deletions.

[0341] In certain embodiments, the nucleic acid further comprises a nucleotide sequence comprising at least one promoter operably linked to the first nucleotide sequence. In a specific embodiment, the at least one promoter operably linked to the first nucleotide sequence is an H5R promoter, a pS promoter, or a LEO promoter. In another specific embodiment, the at least one promoter operably linked to the first nucleotide sequence is an H5R promoter (e.g., an early H5R promoter, a late H5R promoter, or an early H5R promoter and a late H5R promoter).

[0342] In certain embodiments, the nucleic acid further comprises a nucleotide sequence comprising at least one promoter operably linked to the third nucleotide sequence. In a specific embodiment, the at least one promoter operably linked to the third nucleotide sequence is a B8R promoter, a B19R promoter, a E3L promoter, an F11L promoter, and/or a B2R promoter. In another specific embodiment, the at least one promoter operably linked to the third nucleotide sequence is a B8R promoter. In another specific embodiment, the at least one promoter operably linked to the third nucleotide sequence is a B19R promoter. In another specific embodiment, the at least one promoter operably linked to the third nucleotide sequence is a B8R promoter and a B19R promoter. In a particular embodiment, the B8R promoter comprises the nucleotide sequence of SEQ ID NO: 564. In a particular embodiment, the B19R promoter comprises the nucleotide sequence of SEQ ID NO: 565. In a particular embodiment, the E3L promoter comprises the nucleotide sequence of SEQ ID NO: 567. In a particular embodiment, the F11L promoter comprises the nucleotide sequence of SEQ ID NO: 568. In a particular embodiment, the B2R promoter comprises the nucleotide sequence of SEQ ID NO: 569.

[0343] In some embodiments, when the flanking endogenous vaccinia virus genes of the first nucleotide sequence have the same orientation, the first nucleotide sequence is in the same orientation as the flanking endogenous vaccinia virus genes. In other embodiments, when the flanking endogenous vaccinia virus genes of the first nucleotide sequence have the same orientation, the first nucleotide sequence is in the reverse orientation relative to the flanking endogenous vaccinia virus genes. In other embodiments, when the flanking endogenous vaccinia virus genes of the first nucleotide sequence have opposite orientations, the first nucleotide sequence is in the same orientation as the flanking endogenous vaccinia virus gene that is closer to the 5′ end of the recombinant vaccinia virus genome. In other embodiments, when the flanking endogenous vaccinia virus genes of the first nucleotide sequence have opposite orientations, the first nucleotide sequence is in the same orientation as the flanking endogenous vaccinia virus gene that is closer to the 3′ end of the recombinant vaccinia virus genome. In a specific embodiment, the flanking endogenous vaccinia virus genes of the first nucleotide sequence are the C2L and F3L genes. In another specific embodiment, the flanking endogenous vaccinia virus genes of the first nucleotide sequence are the C3L and F4L genes. In another specific embodiment, the flanking endogenous vaccinia virus genes of the first nucleotide sequence are the B14R and B29R genes. In another specific embodiment, the flanking endogenous vaccinia virus genes of the first nucleotide sequence are the B13R and B29R genes. In yet another embodiment, the first nucleotide sequence is in the same orientation as an endogenous vaccinia gene adjacent to the first nucleotide sequence. In a specific embodiment, the endogenous vaccinia gene adjacent to the first nucleotide sequence is the B13R gene. In some embodiments, when the flanking endogenous vaccinia virus genes of the third nucleotide sequence have the same orientation, the third nucleotide sequence is in the same orientation as the flanking endogenous vaccinia virus genes. In other embodiments, when the flanking endogenous vaccinia virus genes of the third nucleotide sequence have the same orientation, the third nucleotide sequence is in the reverse orientation relative to the flanking endogenous vaccinia virus genes. In other embodiments, when the flanking endogenous vaccinia virus genes of the third nucleotide sequence have opposite orientations, the third nucleotide sequence is in the same orientation as the flanking endogenous vaccinia virus gene that is closer to the 5′ end of the recombinant vaccinia virus genome. In other embodiments, when the flanking endogenous vaccinia virus genes of the third nucleotide sequence have opposite orientations, the third nucleotide sequence is in the same orientation as the flanking endogenous vaccinia virus gene that is closer to the 3′ end of the recombinant vaccinia virus genome. In a specific embodiment, the flanking endogenous vaccinia virus genes of the third nucleotide sequence are the C2L and F3L genes. In another specific embodiment, the flanking endogenous vaccinia virus genes of the third nucleotide sequence are the C3L and F4L genes. In another specific embodiment, the flanking endogenous vaccinia virus genes of the third nucleotide sequence are the B14R and B29R genes. In another specific embodiment, the flanking endogenous vaccinia virus genes of the third nucleotide sequence are the B13R and B29R genes. In yet another embodiment, the third nucleotide sequence is in the same orientation as an endogenous vaccinia gene adjacent to the third nucleotide sequence. In a specific embodiment, the endogenous vaccinia gene adjacent to the third nucleotide sequence is the B13R gene.

[0344] In specific embodiments, the anti-CTLA-4 antibody or antigen-binding fragment thereof encoded by the first nucleotide sequence comprises the 6 complementarity-determining regions (CDRs) of ipilimumab. In specific embodiments, the first nucleotide sequence encodes an amino acid sequence comprising the amino acid sequence set forth in SEQ ID NO: 211. In specific embodiments, the first nucleotide sequence comprises the sequence set forth in SEQ ID NO: 214. In specific embodiments, the first nucleotide sequence is set forth in SEQ ID NO: 214.

[0345] In specific embodiments, the FLT3L encoded by the third nucleotide sequence is a soluble form of FLT3L. In particular embodiments, the FLT3L encoded by the third nucleotide sequence is a soluble form of human FLT3L. In certain embodiments, the FLT3L encoded by the third nucleotide sequence is a soluble form of the human FLT3L set forth in GenBank Accession No. U03858.1. For example, in specific embodiments, the FLT3L encoded by the third nucleotide sequence lacks the entire FLT3L transmembrane (e.g., the transmembrane domain of the human FLT3L set forth in GenBank Accession No. U03858.1). In other examples, the FLT3L encoded by the third nucleotide sequence lacks at least 80%, at least 85%, at least 90%, or at least 95% of the FLT3L transmembrane domain (e.g., the transmembrane domain of the human FLT3L set forth in GenBank Accession No. U03858.1). In one embodiment, the FLT3L encoded by the third nucleotide sequence lacks the entire FLT3L transmembrane domain and the entire FLT3L cytoplasmic domain. In another embodiment, the FLT3L encoded by the third nucleotide sequence lacks at least 80%, at least 85%, at least 90%, or at least 95% of the FLT3L transmembrane domain and the entire FLT3L cytoplasmic domain. In another embodiment, the FLT3L encoded by the third nucleotide sequence lacks at least 80%, at least 85%, at least 90%, or at least 95% of the FLT3L transmembrane domain and at least 25%, at least 30%, at least 40%, at least 50%, at least 60%, at least 70%, at least 80%, at least 85%, at least 90%, or at least 95% of the FLT3L cytoplasmic domain. In another embodiment, the FLT3L encoded by the third nucleotide sequence lacks the entire FLT3L transmembrane domain and 5, 6, 7, 8, 9, 10, 12, 13, 14, or 15 of the N-terminal amino acid residues of the FLT3L cytoplasmic domain. In another embodiment, the FLT3L encoded by the third nucleotide sequence lacks the entire FLT3L transmembrane domain and 1, 2, 3, or 4 of the N-terminal amino acid residues of the FLT3L cytoplasmic domain. In certain of the embodiments and aspects, the transmembrane and cytoplasmic domains are of the FLT3L sequence set forth in GenBank Accession No. U03858.1.

[0346] In another embodiment, the FLT3L encoded by the third nucleotide sequence lacks the entire FLT3L transmembrane domain and 1, 2, 3, 4, 5, 6, 7, 8, 9 or 10 amino acids from the carboxy-terminus of the FLT3L extracellular domain. In another embodiment, the FLT3L encoded by the third nucleotide sequence lacks the entire FLT3L transmembrane domain and 11, 12, 13, 14, 15, 16, 17, 18, 19 or 20 amino acids from the carboxy-terminus of the FLT3L extracellular domain. In another embodiment, the FLT3L encoded by the third nucleotide sequence lacks the entire FLT3L transmembrane domain and 1-5, 1-10, 5-10, 10-20, 15-20, 1-20, 5-20, or 10-20 amino acids from the carboxy-terminus of the FLT3L extracellular domain. In certain of the embodiments and aspects, the transmembrane and extracellular domains are of the FLT3L sequence set forth in GenBank Accession No. U03858.1.

[0347] In another embodiment, the FLT3L encoded by the third nucleotide sequence lacks at least 80%, at least 85%, at least 90%, or at least 95% of the FLT3L transmembrane domain and 1, 2, 3, 4, 5, 6, 7, 8, 9 or 10 amino acids from the carboxy-terminus of the FLT3L extracellular domain. In another embodiment, the FLT3L encoded by the third nucleotide sequence lacks at least 80%, at least 85%, at least 90%, or at least 95% of the FLT3L transmembrane domain and 11, 12, 13, 14, 15, 16, 17, 18, 19 or 20 amino acids from the carboxy-terminus of the FLT3L extracellular domain. In another embodiment, the FLT3L encoded by the third nucleotide sequence lacks at least 80%, at least 85%, at least 90%, or at least 95% of the FLT3L transmembrane domain and 1-5, 1-10, 5-10, 10-20, 15-20, 1-20, 5-20, or 10-20 amino acids from the carboxy-terminus of the FLT3L extracellular domain. In certain of the embodiments and aspects, the transmembrane and extracellular domains are of the FLT3L sequence set forth in GenBank Accession No. U03858.1.

[0348] In another embodiment, the FLT3L encoded by the third nucleotide sequence lacks the entire FLT3L transmembrane domain, the entire cytoplasmic domain, and 1, 2, 3, 4, 5, 6, 7, 8, 9 or 10 amino acids from the carboxy-terminus of the FLT3L extracellular domain. In another embodiment, the FLT3L encoded by the third nucleotide sequence lacks the entire FLT3L transmembrane domain, the entire cytoplasmic domain, and 11, 12, 13, 14, 15, 16, 17, 18, 19 or 20 amino acids from the carboxy-terminus of the FLT3L extracellular domain. In another embodiment, the FLT3L encoded by the third nucleotide sequence lacks the entire FLT3L transmembrane domain, the entire cytoplasmic domain, and 1-5, 1-10, 5-10, 10-20, 15-20, 1-20, 5-20, or 10-20 amino acids from the carboxy-terminus of the FLT3L extracellular domain. In certain of the embodiments and aspects, the transmembrane, cytoplasmic and extracellular domains are of the FLT3L sequence set forth in GenBank Accession No. U03858.1.

[0349] In another embodiment, the FLT3L encoded by the third nucleotide sequence lacks at least 25%, at least 30%, at least 40%, at least 50%, at least 60%, at least 70%, at least 80%, at least 85%, at least 90%, or at least 95% of the FLT3L transmembrane domain, the entire cytoplasmic domain, and 1, 2, 3, 4, 5, 6, 7, 8, 9 or 10 amino acids from the carboxy-terminus of the FLT3L extracellular domain. In another embodiment, the FLT3L encoded by the third nucleotide sequence lacks at least 25%, at least 30%, at least 40%, at least 50%, at least 60%, at least 70%, at least 80%, at least 85%, at least 90%, or at least 95% of the FLT3L transmembrane domain, the entire cytoplasmic domain, and 11, 12, 13, 14, 15, 16, 17, 18, 19 or 20 amino acids from the carboxy-terminus of the FLT3L extracellular domain. In another embodiment, the FLT3L encoded by the third nucleotide sequence lacks at least 25%, at least 30%, at least 40%, at least 50%, at least 60%, at least 70%, at least 80%, at least 85%, at least 90%, or at least 95% of the FLT3L transmembrane domain, the entire cytoplasmic domain, and 1-5, 1-10, 5-10, 10-20, 15-20, 1-20, 5-20, or 10-20 amino acids from the carboxy-terminus of the FLT3L extracellular domain. In certain of the embodiments and aspects, the transmembrane, cytoplasmic and extracellular domains are of the FLT3L sequence set forth in GenBank Accession No. U03858.1.

[0350] In another embodiment, the FLT3L encoded by the third nucleotide sequence lacks the entire FLT3L transmembrane domain, at least 25%, at least 30%, at least 40%, at least 50%, at least 60%, at least 70%, at least 80%, at least 85%, at least 90%, or at least 95% of the cytoplasmic domain, and 1, 2, 3, 4, 5, 6, 7, 8, 9 or 10 amino acids from the carboxy-terminus of the FLT3L extracellular domain. In another embodiment, the FLT3L encoded by the third nucleotide sequence lacks the entire FLT3L transmembrane domain, at least 25%, at least 30%, at least 40%, at least 50%, at least 60%, at least 70%, at least 80%, at least 85%, at least 90%, or at least 95% of the cytoplasmic domain, and 11, 12, 13, 14, 15, 16, 17, 18, 19 or 20 amino acids from the carboxy-terminus of the FLT3L extracellular domain. In another embodiment, the FLT3L encoded by the third nucleotide sequence lacks the entire FLT3L transmembrane domain, at least 25%, at least 30%, at least 40%, at least 50%, at least 60%, at least 70%, at least 80%, at least 85%, at least 90%, or at least 95% of the cytoplasmic domain, and 1-5, 1-10, 5-10, 10-20, 15-20, 1-20, 5-20, or 10-20 amino acids from the carboxy-terminus of the FLT3L extracellular domain. In certain of the embodiments and aspects, the transmembrane, cytoplasmic and extracellular domains are of the FLT3L sequence set forth in GenBank Accession No. U03858.1.

[0351] In another embodiment, the FLT3L encoded by the third nucleotide sequence lacks at least 80%, at least 85%, at least 90%, or at least 95% of the FLT3L transmembrane domain, at least 25%, at least 30%, at least 40%, at least 50%, at least 60%, at least 70%, at least 80%, at least 85%, at least 90%, or at least 95% of the cytoplasmic domain, and 1, 2, 3, 4, 5, 6, 7, 8, 9 or 10 amino acids from the carboxy-terminus of the FLT3L extracellular domain. In another embodiment, the FLT3L encoded by the third nucleotide sequence lacks at least 80%, at least 85%, at least 90%, or at least 95% of the FLT3L transmembrane domain, at least 25%, at least 30%, at least 40%, at least 50%, at least 60%, at least 70%, at least 80%, at least 85%, at least 90%, or at least 95% of the cytoplasmic domain, and 11, 12, 13, 14, 15, 16, 17, 18, 19 or 20 amino acids from the carboxy-terminus of the FLT3L extracellular domain. In another embodiment, the FLT3L encoded by the third nucleotide sequence lacks at least 80%, at least 85%, at least 90%, or at least 95% of the FLT3L transmembrane domain, at least 25%, at least 30%, at least 40%, at least 50%, at least 60%, at least 70%, at least 80%, at least 85%, at least 90%, or at least 95% of the cytoplasmic domain, and 1-5, 1-10, 5-10, 10-20, 15-20, 1-20, 5-20, or 10-20 amino acids from the carboxy-terminus of the FLT3L extracellular domain. In certain of the embodiments and aspects, the transmembrane, cytoplasmic and extracellular domains are of the FLT3L sequence set forth in GenBank Accession No. U03858.1.

[0352] In another embodiment, the FLT3L encoded by the third nucleotide sequence lacks the entire FLT3L transmembrane domain, 1, 2, 3, 4, 5, 6, 7, 8, 9, 10, 12, 13, 14, or 15 of the N-terminal amino acid residues of the cytoplasmic domain, and 1, 2, 3, 4, 5, 6, 7, 8, 9 or 10 amino acids from the carboxy-terminus of the FLT3L extracellular domain. In another embodiment, the FLT3L encoded by the third nucleotide sequence lacks the entire FLT3L transmembrane domain, 1, 2, 3, 4, 5, 6, 7, 8, 9, 10, 12, 13, 14, or 15 of the N-terminal amino acid residues of the cytoplasmic domain, and 11, 12, 13, 14, 15, 16, 17, 18, 19 or 20 amino acids from the carboxy-terminus of the FLT3L extracellular domain. In another embodiment, the FLT3L encoded by the third nucleotide sequence lacks the entire FLT3L transmembrane domain, 1, 2, 3, 4, 5, 6, 7, 8, 9, 10, 12, 13, 14, or 15 of the N-terminal amino acid residues of the cytoplasmic domain, and 1-5, 1-10, 5-10, 10-20, 15-20, 1-20, 5-20, or 10-20 amino acids from the carboxy-terminus of the FLT3L extracellular domain. In certain of the embodiments and aspects, the transmembrane, cytoplasmic and extracellular domains are of the FLT3L sequence set forth in GenBank Accession No. U03858.1.

[0353] In another embodiment, the FLT3L encoded by the third nucleotide sequence lacks at least 80%, at least 85%, at least 90%, or at least 95% of the FLT3L transmembrane domain, 1, 2, 3, 4, 5, 6, 7, 8, 9, 10, 12, 13, 14, or 15 of the N-terminal amino acid residues of the cytoplasmic domain, and 1, 2, 3, 4, 5, 6, 7, 8, 9 or 10 amino acids from the carboxy-terminus of the FLT3L extracellular domain. In another embodiment, the FLT3L encoded by the third nucleotide sequence lacks at least 80%, at least 85%, at least 90%, or at least 95% of the FLT3L transmembrane domain, 1, 2, 3, 4, 5, 6, 7, 8, 9, 10, 12, 13, 14, or 15 of the N-terminal amino acid residues of the cytoplasmic domain, and 11, 12, 13, 14, 15, 16, 17, 18, 19 or 20 amino acids from the carboxy-terminus of the FLT3L extracellular domain. In another embodiment, the FLT3L encoded by the third nucleotide sequence lacks at least 80%, at least 85%, at least 90%, or at least 95% of the FLT3L transmembrane domain, 1, 2, 3, 4, 5, 6, 7, 8, 9, 10, 12, 13, 14, or 15 of the N-terminal amino acid residues of the cytoplasmic domain, and 1-5, 1-10, 5-10, 10-20, 15-20, 1-20, 5-20, or 10-20 amino acids from the carboxy-terminus of the FLT3L extracellular domain. In certain of the embodiments and aspects, the transmembrane, cytoplasmic and extracellular domains are of the FLT3L sequence set forth in GenBank Accession No. U03858.1.

[0354] In a specific embodiment, the FLT3L encoded by the third nucleotide sequence is an X7 isoform and the third nucleotide sequence lacks a 179-nucleotide sequence as described in Lyman et al., 1994, Blood 83:2795-2801. In specific embodiments, the FLT3L comprises the amino acid sequence set forth in SEQ ID NO: 213. In specific embodiments, the third nucleotide sequence comprises the sequence set forth in SEQ ID NO: 216. In specific embodiments, the third nucleotide sequence is set forth in SEQ ID NO: 216.

[0355] In another aspect, provided herein is a nucleic acid comprising a recombinant vaccinia virus genome, comprising: (a) deletions in the following genes: C2L, C1L, N1L, N2L, M1L, M2L, K1L, K2L, K3L, K4L, K5L, K6L, K7R, F1L, F2L, F3L, B14R, B15R, B 16R, B17L, B18R, B 19R, and B20R; (b) deletions in the following genes in the 3′ ITR: B21R, B22R, B23R, B24R, B25R, B26R, B27R, B28R, and B29R; (c) a first transgene comprising a first nucleotide sequence encoding an antibody or antigen-binding fragment thereof that specifically binds to CTLA-4 (e.g., human CTLA-4); and (d) a third transgene comprising a third nucleotide sequence encoding FLT3L; wherein the deletions in the C2L, F3L, B14R, and B29R vaccinia genes are partial deletions; and wherein the nucleic acid further comprises: (i) a nucleotide sequence comprising at least one promoter operably linked to the first nucleotide sequence, wherein the at least one promoter operably linked to the first nucleotide sequence is an H5R promoter, a pS promoter, or a LEO promoter; and/or (ii) a nucleotide sequence comprising at least one promoter operably linked to the third nucleotide sequence, wherein the at least one promoter operably linked to the third nucleotide sequence is a B8R promoter, a B19R promoter, a E3L promoter, an F11L promoter, and/or a B2R promoter. In specific embodiments, the nucleic acid further comprises a deletion in the B8R gene. In a particular embodiment, the B8R promoter comprises the nucleotide sequence of SEQ ID NO: 564. In a particular embodiment, the B19R promoter comprises the nucleotide sequence of SEQ ID NO: 565. In a particular embodiment, the E3L promoter comprises the nucleotide sequence of SEQ ID NO: 567. In a particular embodiment, the F11L promoter comprises the nucleotide sequence of SEQ ID NO: 568. In a particular embodiment, the B2R promoter comprises the nucleotide sequence of SEQ ID NO: 569.

[0356] In certain embodiments, the at least one promoter operably linked to the first nucleotide sequence is an H5R promoter (e.g., an early H5R promoter, a late H5R promoter, or an early H5R promoter and a late H5R promoter).

[0357] In certain embodiments, the at least one promoter operably linked to the third nucleotide sequence is a B8R promoter. In certain embodiments, the at least one promoter operably linked to the third nucleotide sequence is a B19R promoter. In certain embodiments, the at least one promoter operably linked to the third nucleotide sequence is a B8R promoter and a B19R promoter. In a particular embodiment, the B8R promoter comprises the nucleotide sequence of SEQ ID NO: 564. In a particular embodiment, the B19R promoter comprises the nucleotide sequence of SEQ ID NO: 565.

[0358] In some embodiments, when the flanking endogenous vaccinia virus genes of the first nucleotide sequence have the same orientation, the first nucleotide sequence is in the same orientation as the flanking endogenous vaccinia virus genes. In other embodiments, when the flanking endogenous vaccinia virus genes of the first nucleotide sequence have the same orientation, the first nucleotide sequence is in the reverse orientation relative to the flanking endogenous vaccinia virus genes. In other embodiments, when the flanking endogenous vaccinia virus genes of the first nucleotide sequence have opposite orientations, the first nucleotide sequence is in the same orientation as the flanking endogenous vaccinia virus gene that is closer to the 5′ end of the recombinant vaccinia virus genome. In other embodiments, when the flanking endogenous vaccinia virus genes of the first nucleotide sequence have opposite orientations, the first nucleotide sequence is in the same orientation as the flanking endogenous vaccinia virus gene that is closer to the 3′ end of the recombinant vaccinia virus genome. In a specific embodiment, the flanking endogenous vaccinia virus genes of the first nucleotide sequence are the C2L and F3L genes. In another specific embodiment, the flanking endogenous vaccinia virus genes of the first nucleotide sequence are the C3L and F4L genes. In another specific embodiment, the flanking endogenous vaccinia virus genes of the first nucleotide sequence are the B14R and B29R genes. In another specific embodiment, the flanking endogenous vaccinia virus genes of the first nucleotide sequence are the B13R and B29R genes. In yet another embodiment, the first nucleotide sequence is in the same orientation as an endogenous vaccinia gene adjacent to the first nucleotide sequence. In a specific embodiment, the endogenous vaccinia gene adjacent to the first nucleotide sequence is the B13R gene. In some embodiments, when the flanking endogenous vaccinia virus genes of the third nucleotide sequence have the same orientation, the third nucleotide sequence is in the same orientation as the flanking endogenous vaccinia virus genes. In other embodiments, when the flanking endogenous vaccinia virus genes of the third nucleotide sequence have the same orientation, the third nucleotide sequence is in the reverse orientation relative to the flanking endogenous vaccinia virus genes. In other embodiments, when the flanking endogenous vaccinia virus genes of the third nucleotide sequence have opposite orientations, the third nucleotide sequence is in the same orientation as the flanking endogenous vaccinia virus gene that is closer to the 5′ end of the recombinant vaccinia virus genome. In other embodiments, when the flanking endogenous vaccinia virus genes of the third nucleotide sequence have opposite orientations, the third nucleotide sequence is in the same orientation as the flanking endogenous vaccinia virus gene that is closer to the 3′ end of the recombinant vaccinia virus genome. In a specific embodiment, the flanking endogenous vaccinia virus genes of the third nucleotide sequence are the C2L and F3L genes. In another specific embodiment, the flanking endogenous vaccinia virus genes of the third nucleotide sequence are the C3L and F4L genes. In another specific embodiment, the flanking endogenous vaccinia virus genes of the third nucleotide sequence are the B14R and B29R genes. In another specific embodiment, the flanking endogenous vaccinia virus genes of the third nucleotide sequence are the B13R and B29R genes. In yet another embodiment, the third nucleotide sequence is in the same orientation as an endogenous vaccinia gene adjacent to the third nucleotide sequence. In a specific embodiment, the endogenous vaccinia gene adjacent to the third nucleotide sequence is the B13R gene.

[0359] In specific embodiments, the anti-CTLA-4 antibody or antigen-binding fragment thereof encoded by the first nucleotide sequence comprises the 6 complementarity-determining regions (CDRs) of ipilimumab. In specific embodiments, the first nucleotide sequence encodes an amino acid sequence comprising the amino acid sequence set forth in SEQ ID NO: 211. In specific embodiments, the first nucleotide sequence comprises the sequence set forth in SEQ ID NO: 214. In specific embodiments, the first nucleotide sequence is set forth in SEQ ID NO: 214.

[0360] In specific embodiments, the FLT3L encoded by the third nucleotide sequence is a soluble form of FLT3L. In particular embodiments, the FLT3L encoded by the third nucleotide sequence is a soluble form of human FLT3L. In certain embodiments, the FLT3L encoded by the third nucleotide sequence is a soluble form of the human FLT3L set forth in GenBank Accession No. U03858.1. For example, in specific embodiments, the FLT3L encoded by the third nucleotide sequence lacks the entire FLT3L transmembrane (e.g., the transmembrane domain of the human FLT3L set forth in GenBank Accession No. U03858.1). In other examples, the FLT3L encoded by the third nucleotide sequence lacks at least 80%, at least 85%, at least 90%, or at least 95% of the FLT3L transmembrane domain (e.g., the transmembrane domain of the human FLT3L set forth in GenBank Accession No. U03858.1). In one embodiment, the FLT3L encoded by the third nucleotide sequence lacks the entire FLT3L transmembrane domain and the entire FLT3L cytoplasmic domain. In another embodiment, the FLT3L encoded by the third nucleotide sequence lacks at least 80%, at least 85%, at least 90%, or at least 95% of the FLT3L transmembrane domain and the entire FLT3L cytoplasmic domain. In another embodiment, the FLT3L encoded by the third nucleotide sequence lacks at least 80%, at least 85%, at least 90%, or at least 95% of the FLT3L transmembrane domain and at least 25%, at least 30%, at least 40%, at least 50%, at least 60%, at least 70%, at least 80%, at least 85%, at least 90%, or at least 95% of the FLT3L cytoplasmic domain. In another embodiment, the FLT3L encoded by the third nucleotide sequence lacks the entire FLT3L transmembrane domain and 5, 6, 7, 8, 9, 10, 12, 13, 14, or 15 of the N-terminal amino acid residues of the FLT3L cytoplasmic domain. In another embodiment, the FLT3L encoded by the third nucleotide sequence lacks the entire FLT3L transmembrane domain and 1, 2, 3, or 4 of the N-terminal amino acid residues of the FLT3L cytoplasmic domain. In certain of the embodiments and aspects, the transmembrane and cytoplasmic domains are of the FLT3L sequence set forth in GenBank Accession No. U03858.1.

[0361] In another embodiment, the FLT3L encoded by the third nucleotide sequence lacks the entire FLT3L transmembrane domain and 1, 2, 3, 4, 5, 6, 7, 8, 9 or 10 amino acids from the carboxy-terminus of the FLT3L extracellular domain. In another embodiment, the FLT3L encoded by the third nucleotide sequence lacks the entire FLT3L transmembrane domain and 11, 12, 13, 14, 15, 16, 17, 18, 19 or 20 amino acids from the carboxy-terminus of the FLT3L extracellular domain. In another embodiment, the FLT3L encoded by the third nucleotide sequence lacks the entire FLT3L transmembrane domain and 1-5, 1-10, 5-10, 10-20, 15-20, 1-20, 5-20, or 10-20 amino acids from the carboxy-terminus of the FLT3L extracellular domain. In certain of the embodiments and aspects, the transmembrane and extracellular domains are of the FLT3L sequence set forth in GenBank Accession No. U03858.1.

[0362] In another embodiment, the FLT3L encoded by the third nucleotide sequence lacks at least 80%, at least 85%, at least 90%, or at least 95% of the FLT3L transmembrane domain and 1, 2, 3, 4, 5, 6, 7, 8, 9 or 10 amino acids from the carboxy-terminus of the FLT3L extracellular domain. In another embodiment, the FLT3L encoded by the third nucleotide sequence lacks at least 80%, at least 85%, at least 90%, or at least 95% of the FLT3L transmembrane domain and 11, 12, 13, 14, 15, 16, 17, 18, 19 or 20 amino acids from the carboxy-terminus of the FLT3L extracellular domain. In another embodiment, the FLT3L encoded by the third nucleotide sequence lacks at least 80%, at least 85%, at least 90%, or at least 95% of the FLT3L transmembrane domain and 1-5, 1-10, 5-10, 10-20, 15-20, 1-20, 5-20, or 10-20 amino acids from the carboxy-terminus of the FLT3L extracellular domain. In certain of the embodiments and aspects, the transmembrane and extracellular domains are of the FLT3L sequence set forth in GenBank Accession No. U03858.1.

[0363] In another embodiment, the FLT3L encoded by the third nucleotide sequence lacks the entire FLT3L transmembrane domain, the entire cytoplasmic domain, and 1, 2, 3, 4, 5, 6, 7, 8, 9 or 10 amino acids from the carboxy-terminus of the FLT3L extracellular domain. In another embodiment, the FLT3L encoded by the third nucleotide sequence lacks the entire FLT3L transmembrane domain, the entire cytoplasmic domain, and 11, 12, 13, 14, 15, 16, 17, 18, 19 or 20 amino acids from the carboxy-terminus of the FLT3L extracellular domain. In another embodiment, the FLT3L encoded by the third nucleotide sequence lacks the entire FLT3L transmembrane domain, the entire cytoplasmic domain, and 1-5, 1-10, 5-10, 10-20, 15-20, 1-20, 5-20, or 10-20 amino acids from the carboxy-terminus of the FLT3L extracellular domain. In certain of the embodiments and aspects, the transmembrane, cytoplasmic and extracellular domains are of the FLT3L sequence set forth in GenBank Accession No. U03858.1.

[0364] In another embodiment, the FLT3L encoded by the third nucleotide sequence lacks at least 25%, at least 30%, at least 40%, at least 50%, at least 60%, at least 70%, at least 80%, at least 85%, at least 90%, or at least 95% of the FLT3L transmembrane domain, the entire cytoplasmic domain, and 1, 2, 3, 4, 5, 6, 7, 8, 9 or 10 amino acids from the carboxy-terminus of the FLT3L extracellular domain. In another embodiment, the FLT3L encoded by the third nucleotide sequence lacks at least 25%, at least 30%, at least 40%, at least 50%, at least 60%, at least 70%, at least 80%, at least 85%, at least 90%, or at least 95% of the FLT3L transmembrane domain, the entire cytoplasmic domain, and 11, 12, 13, 14, 15, 16, 17, 18, 19 or 20 amino acids from the carboxy-terminus of the FLT3L extracellular domain. In another embodiment, the FLT3L encoded by the third nucleotide sequence lacks at least 25%, at least 30%, at least 40%, at least 50%, at least 60%, at least 70%, at least 80%, at least 85%, at least 90%, or at least 95% of the FLT3L transmembrane domain, the entire cytoplasmic domain, and 1-5, 1-10, 5-10, 10-20, 15-20, 1-20, 5-20, or 10-20 amino acids from the carboxy-terminus of the FLT3L extracellular domain. In certain of the embodiments and aspects, the transmembrane, cytoplasmic and extracellular domains are of the FLT3L sequence set forth in GenBank Accession No. U03858.1.

[0365] In another embodiment, the FLT3L encoded by the third nucleotide sequence lacks the entire FLT3L transmembrane domain, at least 25%, at least 30%, at least 40%, at least 50%, at least 60%, at least 70%, at least 80%, at least 85%, at least 90%, or at least 95% of the cytoplasmic domain, and 1, 2, 3, 4, 5, 6, 7, 8, 9 or 10 amino acids from the carboxy-terminus of the FLT3L extracellular domain. In another embodiment, the FLT3L encoded by the third nucleotide sequence lacks the entire FLT3L transmembrane domain, at least 25%, at least 30%, at least 40%, at least 50%, at least 60%, at least 70%, at least 80%, at least 85%, at least 90%, or at least 95% of the cytoplasmic domain, and 11, 12, 13, 14, 15, 16, 17, 18, 19 or 20 amino acids from the carboxy-terminus of the FLT3L extracellular domain. In another embodiment, the FLT3L encoded by the third nucleotide sequence lacks the entire FLT3L transmembrane domain, at least 25%, at least 30%, at least 40%, at least 50%, at least 60%, at least 70%, at least 80%, at least 85%, at least 90%, or at least 95% of the cytoplasmic domain, and 1-5, 1-10, 5-10, 10-20, 15-20, 1-20, 5-20, or 10-20 amino acids from the carboxy-terminus of the FLT3L extracellular domain. In certain of the embodiments and aspects, the transmembrane, cytoplasmic and extracellular domains are of the FLT3L sequence set forth in GenBank Accession No. U03858.1.

[0366] In another embodiment, the FLT3L encoded by the third nucleotide sequence lacks at least 80%, at least 85%, at least 90%, or at least 95% of the FLT3L transmembrane domain, at least 25%, at least 30%, at least 40%, at least 50%, at least 60%, at least 70%, at least 80%, at least 85%, at least 90%, or at least 95% of the cytoplasmic domain, and 1, 2, 3, 4, 5, 6, 7, 8, 9 or 10 amino acids from the carboxy-terminus of the FLT3L extracellular domain. In another embodiment, the FLT3L encoded by the third nucleotide sequence lacks at least 80%, at least 85%, at least 90%, or at least 95% of the FLT3L transmembrane domain, at least 25%, at least 30%, at least 40%, at least 50%, at least 60%, at least 70%, at least 80%, at least 85%, at least 90%, or at least 95% of the cytoplasmic domain, and 11, 12, 13, 14, 15, 16, 17, 18, 19 or 20 amino acids from the carboxy-terminus of the FLT3L extracellular domain. In another embodiment, the FLT3L encoded by the third nucleotide sequence lacks at least 80%, at least 85%, at least 90%, or at least 95% of the FLT3L transmembrane domain, at least 25%, at least 30%, at least 40%, at least 50%, at least 60%, at least 70%, at least 80%, at least 85%, at least 90%, or at least 95% of the cytoplasmic domain, and 1-5, 1-10, 5-10, 10-20, 15-20, 1-20, 5-20, or 10-20 amino acids from the carboxy-terminus of the FLT3L extracellular domain. In certain of the embodiments and aspects, the transmembrane, cytoplasmic and extracellular domains are of the FLT3L sequence set forth in GenBank Accession No. U03858.1.

[0367] In another embodiment, the FLT3L encoded by the third nucleotide sequence lacks the entire FLT3L transmembrane domain, 1, 2, 3, 4, 5, 6, 7, 8, 9, 10, 12, 13, 14, or 15 of the N-terminal amino acid residues of the cytoplasmic domain, and 1, 2, 3, 4, 5, 6, 7, 8, 9 or 10 amino acids from the carboxy-terminus of the FLT3L extracellular domain. In another embodiment, the FLT3L encoded by the third nucleotide sequence lacks the entire FLT3L transmembrane domain, 1, 2, 3, 4, 5, 6, 7, 8, 9, 10, 12, 13, 14, or 15 of the N-terminal amino acid residues of the cytoplasmic domain, and 11, 12, 13, 14, 15, 16, 17, 18, 19 or 20 amino acids from the carboxy-terminus of the FLT3L extracellular domain. In another embodiment, the FLT3L encoded by the third nucleotide sequence lacks the entire FLT3L transmembrane domain, 1, 2, 3, 4, 5, 6, 7, 8, 9, 10, 12, 13, 14, or 15 of the N-terminal amino acid residues of the cytoplasmic domain, and 1-5, 1-10, 5-10, 10-20, 15-20, 1-20, 5-20, or 10-20 amino acids from the carboxy-terminus of the FLT3L extracellular domain. In certain of the embodiments and aspects, the transmembrane, cytoplasmic and extracellular domains are of the FLT3L sequence set forth in GenBank Accession No. U03858.1.

[0368] In another embodiment, the FLT3L encoded by the third nucleotide sequence lacks at least 80%, at least 85%, at least 90%, or at least 95% of the FLT3L transmembrane domain, 1, 2, 3, 4, 5, 6, 7, 8, 9, 10, 12, 13, 14, or 15 of the N-terminal amino acid residues of the cytoplasmic domain, and 1, 2, 3, 4, 5, 6, 7, 8, 9 or 10 amino acids from the carboxy-terminus of the FLT3L extracellular domain. In another embodiment, the FLT3L encoded by the third nucleotide sequence lacks at least 80%, at least 85%, at least 90%, or at least 95% of the FLT3L transmembrane domain, 1, 2, 3, 4, 5, 6, 7, 8, 9, 10, 12, 13, 14, or 15 of the N-terminal amino acid residues of the cytoplasmic domain, and 11, 12, 13, 14, 15, 16, 17, 18, 19 or 20 amino acids from the carboxy-terminus of the FLT3L extracellular domain. In another embodiment, the FLT3L encoded by the third nucleotide sequence lacks at least 80%, at least 85%, at least 90%, or at least 95% of the FLT3L transmembrane domain, 1, 2, 3, 4, 5, 6, 7, 8, 9, 10, 12, 13, 14, or 15 of the N-terminal amino acid residues of the cytoplasmic domain, and 1-5, 1-10, 5-10, 10-20, 15-20, 1-20, 5-20, or 10-20 amino acids from the carboxy-terminus of the FLT3L extracellular domain. In certain of the embodiments and aspects, the transmembrane, cytoplasmic and extracellular domains are of the FLT3L sequence set forth in GenBank Accession No. U03858.1.

[0369] In a specific embodiment, the FLT3L encoded by the third nucleotide sequence is an X7 isoform and the third nucleotide sequence lacks a 179-nucleotide sequence as described in Lyman et al., 1994, Blood 83:2795-2801. In specific embodiments, the FLT3L comprises the amino acid sequence set forth in SEQ ID NO: 213. In specific embodiments, the third nucleotide sequence comprises the sequence set forth in SEQ ID NO: 216. In specific embodiments, the third nucleotide sequence is set forth in SEQ ID NO: 216.

[0370] In another aspect, provided herein is a nucleic acid comprising a recombinant vaccinia virus genome, comprising: (a) deletions in the following genes: C2L, C1L, N1L, N2L, M1L, M2L, K1L, K2L, K3L, K4L, K5L, K6L, K7R, F1L, F2L, F3L, B8R, B14R, B15R, B16R, B17L, B18R, B19R, and B20R; (b) deletions in the following genes in the 3′ ITR: B21R, B22R, B23R, B24R, B25R, B26R, B27R, B28R, and B29R; (c) a second transgene comprising a second nucleotide sequence encoding an IL-12 polypeptide; and (d) a third transgene comprising a third nucleotide sequence encoding FLT3L; wherein the deletions in the C2L, F3L, B14R, and B29R vaccinia genes are partial deletions. In certain embodiments, the nucleic acid further comprises a nucleotide sequence comprising at least one promoter operably linked to the second nucleotide sequence. In a specific embodiment, the at least one promoter operably linked to the second nucleotide sequence is a late promoter. In a further specific embodiment, the late promoter comprises the nucleotide sequence of SEQ ID NO: 561, an F17R promoter, or a D13L promoter. In another further specific embodiment, the late promoter comprises the nucleotide sequence of SEQ ID NO: 561. In another embodiment, the F17R promoter comprises the nucleotide sequence of SEQ ID NO:563. In yet another embodiment, the D13L promoter comprises the nucleotide sequence of SEQ ID NO:562.

[0371] In certain embodiments, the nucleic acid further comprises a nucleotide sequence comprising at least one promoter operably linked to the third nucleotide sequence. In a specific embodiment, the at least one promoter operably linked to the third nucleotide sequence is a B8R promoter, a B19R promoter, a E3L promoter, an F11L promoter, and/or a B2R promoter. In another specific embodiment, the at least one promoter operably linked to the third nucleotide sequence is a B8R promoter. In another specific embodiment, the at least one promoter operably linked to the third nucleotide sequence is a B19R promoter. In another specific embodiment, the at least one promoter operably linked to the third nucleotide sequence is a B8R promoter and a B19R promoter. In a particular embodiment, the B8R promoter comprises the nucleotide sequence of SEQ ID NO: 564. In a particular embodiment, the B19R promoter comprises the nucleotide sequence of SEQ ID NO: 565. In a particular embodiment, the E3L promoter comprises the nucleotide sequence of SEQ ID NO: 567. In a particular embodiment, the F11L promoter comprises the nucleotide sequence of SEQ ID NO: 568. In a particular embodiment, the B2R promoter comprises the nucleotide sequence of SEQ ID NO: 569.

[0372] In some embodiments, when the flanking endogenous vaccinia virus genes of the second nucleotide sequence have the same orientation, the second nucleotide sequence is in the same orientation as the flanking endogenous vaccinia virus genes. In other embodiments, when the flanking endogenous vaccinia virus genes of the second nucleotide sequence have the same orientation, the second nucleotide sequence is in the reverse orientation relative to the flanking endogenous vaccinia virus genes. In other embodiments, when the flanking endogenous vaccinia virus genes of the second nucleotide sequence have opposite orientations, the second nucleotide sequence is in the same orientation as the flanking endogenous vaccinia virus gene that is closer to the 5′ end of the recombinant vaccinia virus genome. In other embodiments, when the flanking endogenous vaccinia virus genes of the second nucleotide sequence have opposite orientations, the second nucleotide sequence is in the same orientation as the flanking endogenous vaccinia virus gene that is closer to the 3′ end of the recombinant vaccinia virus genome. In a specific embodiment, the flanking endogenous vaccinia virus genes of the second nucleotide sequence are the C2L and F3L genes. In another specific embodiment, the flanking endogenous vaccinia virus genes of the second nucleotide sequence are the C3L and F4L genes. In another specific embodiment, the flanking endogenous vaccinia virus genes of the second nucleotide sequence are the B14R and B29R genes. In another specific embodiment, the flanking endogenous vaccinia virus genes of the second nucleotide sequence are the B13R and B29R genes. In yet another embodiment, the second nucleotide sequence is in the same orientation as an endogenous vaccinia gene adjacent to the second nucleotide sequence. In a specific embodiment, the endogenous vaccinia gene adjacent to the second nucleotide sequence is the B13R gene. In some embodiments, when the flanking endogenous vaccinia virus genes of the third nucleotide sequence have the same orientation, the third nucleotide sequence is in the same orientation as the flanking endogenous vaccinia virus genes. In other embodiments, when the flanking endogenous vaccinia virus genes of the third nucleotide sequence have the same orientation, the third nucleotide sequence is in the reverse orientation relative to the flanking endogenous vaccinia virus genes. In other embodiments, when the flanking endogenous vaccinia virus genes of the third nucleotide sequence have opposite orientations, the third nucleotide sequence is in the same orientation as the flanking endogenous vaccinia virus gene that is closer to the 5′ end of the recombinant vaccinia virus genome. In other embodiments, when the flanking endogenous vaccinia virus genes of the third nucleotide sequence have opposite orientations, the third nucleotide sequence is in the same orientation as the flanking endogenous vaccinia virus gene that is closer to the 3′ end of the recombinant vaccinia virus genome. In a specific embodiment, the flanking endogenous vaccinia virus genes of the third nucleotide sequence are the C2L and F3L genes. In another specific embodiment, the flanking endogenous vaccinia virus genes of the third nucleotide sequence are the C3L and F4L genes. In another specific embodiment, the flanking endogenous vaccinia virus genes of the third nucleotide sequence are the B14R and B29R genes. In another specific embodiment, the flanking endogenous vaccinia virus genes of the third nucleotide sequence are the B13R and B29R genes. In yet another embodiment, the third nucleotide sequence is in the same orientation as an endogenous vaccinia gene adjacent to the third nucleotide sequence. In a specific embodiment, the endogenous vaccinia gene adjacent to the third nucleotide sequence is the B13R gene.

[0373] In specific embodiments, the IL-12 polypeptide is membrane-bound. In specific embodiments, the IL-12 polypeptide comprises IL-12 p35 (e.g., human IL-12 p35), IL-12 p40 (e.g., human IL-12 p40) or IL-12 p70 (e.g., human IL-12 p70). In specific embodiments, the IL-12 polypeptide is membrane-bound and comprises IL-12 p35 (e.g., human IL-12 p35), or IL-12 p70 (e.g., human IL-12 p70), and a transmembrane domain and a cytoplasmic domain (e.g., the transmembrane and cytoplasmic domains of B7-1, TNFα, or FLT3L). In specific embodiments, the IL-12 polypeptide comprises the amino acid sequence set forth in SEQ ID NO: 212. In specific embodiments, the second nucleotide sequence comprises the sequence set forth in SEQ ID NO: 215. In specific embodiments, the second nucleotide sequence is set forth in SEQ ID NO: 215.

[0374] In specific embodiments, the FLT3L encoded by the third nucleotide sequence is a soluble form of FLT3L. In particular embodiments, the FLT3L encoded by the third nucleotide sequence is a soluble form of human FLT3L. In certain embodiments, the FLT3L encoded by the third nucleotide sequence is a soluble form of the human FLT3L set forth in GenBank Accession No. U03858.1. For example, in specific embodiments, the FLT3L encoded by the third nucleotide sequence lacks the entire FLT3L transmembrane (e.g., the transmembrane domain of the human FLT3L set forth in GenBank Accession No. U03858.1). In other examples, the FLT3L encoded by the third nucleotide sequence lacks at least 80%, at least 85%, at least 90%, or at least 95% of the FLT3L transmembrane domain (e.g., the transmembrane domain of the human FLT3L set forth in GenBank Accession No. U03858.1). In one embodiment, the FLT3L encoded by the third nucleotide sequence lacks the entire FLT3L transmembrane domain and the entire FLT3L cytoplasmic domain. In another embodiment, the FLT3L encoded by the third nucleotide sequence lacks at least 80%, at least 85%, at least 90%, or at least 95% of the FLT3L transmembrane domain and the entire FLT3L cytoplasmic domain. In another embodiment, the FLT3L encoded by the third nucleotide sequence lacks at least 80%, at least 85%, at least 90%, or at least 95% of the FLT3L transmembrane domain and at least 25%, at least 30%, at least 40%, at least 50%, at least 60%, at least 70%, at least 80%, at least 85%, at least 90%, or at least 95% of the FLT3L cytoplasmic domain. In another embodiment, the FLT3L encoded by the third nucleotide sequence lacks the entire FLT3L transmembrane domain and 5, 6, 7, 8, 9, 10, 12, 13, 14, or 15 of the N-terminal amino acid residues of the FLT3L cytoplasmic domain. In another embodiment, the FLT3L encoded by the third nucleotide sequence lacks the entire FLT3L transmembrane domain and 1, 2, 3, or 4 of the N-terminal amino acid residues of the FLT3L cytoplasmic domain. In certain of the embodiments and aspects, the transmembrane and cytoplasmic domains are of the FLT3L sequence set forth in GenBank Accession No. U03858.1.

[0375] In another embodiment, the FLT3L encoded by the third nucleotide sequence lacks the entire FLT3L transmembrane domain and 1, 2, 3, 4, 5, 6, 7, 8, 9 or 10 amino acids from the carboxy-terminus of the FLT3L extracellular domain. In another embodiment, the FLT3L encoded by the third nucleotide sequence lacks the entire FLT3L transmembrane domain and 11, 12, 13, 14, 15, 16, 17, 18, 19 or 20 amino acids from the carboxy-terminus of the FLT3L extracellular domain. In another embodiment, the FLT3L encoded by the third nucleotide sequence lacks the entire FLT3L transmembrane domain and 1-5, 1-10, 5-10, 10-20, 15-20, 1-20, 5-20, or 10-20 amino acids from the carboxy-terminus of the FLT3L extracellular domain. In certain of the embodiments and aspects, the transmembrane and extracellular domains are of the FLT3L sequence set forth in GenBank Accession No. U03858.1.

[0376] In another embodiment, the FLT3L encoded by the third nucleotide sequence lacks at least 80%, at least 85%, at least 90%, or at least 95% of the FLT3L transmembrane domain and 1, 2, 3, 4, 5, 6, 7, 8, 9 or 10 amino acids from the carboxy-terminus of the FLT3L extracellular domain. In another embodiment, the FLT3L encoded by the third nucleotide sequence lacks at least 80%, at least 85%, at least 90%, or at least 95% of the FLT3L transmembrane domain and 11, 12, 13, 14, 15, 16, 17, 18, 19 or 20 amino acids from the carboxy-terminus of the FLT3L extracellular domain. In another embodiment, the FLT3L encoded by the third nucleotide sequence lacks at least 80%, at least 85%, at least 90%, or at least 95% of the FLT3L transmembrane domain and 1-5, 1-10, 5-10, 10-20, 15-20, 1-20, 5-20, or 10-20 amino acids from the carboxy-terminus of the FLT3L extracellular domain. In certain of the embodiments and aspects, the transmembrane and extracellular domains are of the FLT3L sequence set forth in GenBank Accession No. U03858.1.

[0377] In another embodiment, the FLT3L encoded by the third nucleotide sequence lacks the entire FLT3L transmembrane domain, the entire cytoplasmic domain, and 1, 2, 3, 4, 5, 6, 7, 8, 9 or 10 amino acids from the carboxy-terminus of the FLT3L extracellular domain. In another embodiment, the FLT3L encoded by the third nucleotide sequence lacks the entire FLT3L transmembrane domain, the entire cytoplasmic domain, and 11, 12, 13, 14, 15, 16, 17, 18, 19 or 20 amino acids from the carboxy-terminus of the FLT3L extracellular domain. In another embodiment, the FLT3L encoded by the third nucleotide sequence lacks the entire FLT3L transmembrane domain, the entire cytoplasmic domain, and 1-5, 1-10, 5-10, 10-20, 15-20, 1-20, 5-20, or 10-20 amino acids from the carboxy-terminus of the FLT3L extracellular domain. In certain of the embodiments and aspects, the transmembrane, cytoplasmic and extracellular domains are of the FLT3L sequence set forth in GenBank Accession No. U03858.1.

[0378] In another embodiment, the FLT3L encoded by the third nucleotide sequence lacks at least 25%, at least 30%, at least 40%, at least 50%, at least 60%, at least 70%, at least 80%, at least 85%, at least 90%, or at least 95% of the FLT3L transmembrane domain, the entire cytoplasmic domain, and 1, 2, 3, 4, 5, 6, 7, 8, 9 or 10 amino acids from the carboxy-terminus of the FLT3L extracellular domain. In another embodiment, the FLT3L encoded by the third nucleotide sequence lacks at least 25%, at least 30%, at least 40%, at least 50%, at least 60%, at least 70%, at least 80%, at least 85%, at least 90%, or at least 95% of the FLT3L transmembrane domain, the entire cytoplasmic domain, and 11, 12, 13, 14, 15, 16, 17, 18, 19 or 20 amino acids from the carboxy-terminus of the FLT3L extracellular domain. In another embodiment, the FLT3L encoded by the third nucleotide sequence lacks at least 25%, at least 30%, at least 40%, at least 50%, at least 60%, at least 70%, at least 80%, at least 85%, at least 90%, or at least 95% of the FLT3L transmembrane domain, the entire cytoplasmic domain, and 1-5, 1-10, 5-10, 10-20, 15-20, 1-20, 5-20, or 10-20 amino acids from the carboxy-terminus of the FLT3L extracellular domain. In certain of the embodiments and aspects, the transmembrane, cytoplasmic and extracellular domains are of the FLT3L sequence set forth in GenBank Accession No. U03858.1.

[0379] In another embodiment, the FLT3L encoded by the third nucleotide sequence lacks the entire FLT3L transmembrane domain, at least 25%, at least 30%, at least 40%, at least 50%, at least 60%, at least 70%, at least 80%, at least 85%, at least 90%, or at least 95% of the cytoplasmic domain, and 1, 2, 3, 4, 5, 6, 7, 8, 9 or 10 amino acids from the carboxy-terminus of the FLT3L extracellular domain. In another embodiment, the FLT3L encoded by the third nucleotide sequence lacks the entire FLT3L transmembrane domain, at least 25%, at least 30%, at least 40%, at least 50%, at least 60%, at least 70%, at least 80%, at least 85%, at least 90%, or at least 95% of the cytoplasmic domain, and 11, 12, 13, 14, 15, 16, 17, 18, 19 or 20 amino acids from the carboxy-terminus of the FLT3L extracellular domain. In another embodiment, the FLT3L encoded by the third nucleotide sequence lacks the entire FLT3L transmembrane domain, at least 25%, at least 30%, at least 40%, at least 50%, at least 60%, at least 70%, at least 80%, at least 85%, at least 90%, or at least 95% of the cytoplasmic domain, and 1-5, 1-10, 5-10, 10-20, 15-20, 1-20, 5-20, or 10-20 amino acids from the carboxy-terminus of the FLT3L extracellular domain. In certain of the embodiments and aspects, the transmembrane, cytoplasmic and extracellular domains are of the FLT3L sequence set forth in GenBank Accession No. U03858.1.

[0380] In another embodiment, the FLT3L encoded by the third nucleotide sequence lacks at least 80%, at least 85%, at least 90%, or at least 95% of the FLT3L transmembrane domain, at least 25%, at least 30%, at least 40%, at least 50%, at least 60%, at least 70%, at least 80%, at least 85%, at least 90%, or at least 95% of the cytoplasmic domain, and 1, 2, 3, 4, 5, 6, 7, 8, 9 or 10 amino acids from the carboxy-terminus of the FLT3L extracellular domain. In another embodiment, the FLT3L encoded by the third nucleotide sequence lacks at least 80%, at least 85%, at least 90%, or at least 95% of the FLT3L transmembrane domain, at least 25%, at least 30%, at least 40%, at least 50%, at least 60%, at least 70%, at least 80%, at least 85%, at least 90%, or at least 95% of the cytoplasmic domain, and 11, 12, 13, 14, 15, 16, 17, 18, 19 or 20 amino acids from the carboxy-terminus of the FLT3L extracellular domain. In another embodiment, the FLT3L encoded by the third nucleotide sequence lacks at least 80%, at least 85%, at least 90%, or at least 95% of the FLT3L transmembrane domain, at least 25%, at least 30%, at least 40%, at least 50%, at least 60%, at least 70%, at least 80%, at least 85%, at least 90%, or at least 95% of the cytoplasmic domain, and 1-5, 1-10, 5-10, 10-20, 15-20, 1-20, 5-20, or 10-20 amino acids from the carboxy-terminus of the FLT3L extracellular domain. In certain of the embodiments and aspects, the transmembrane, cytoplasmic and extracellular domains are of the FLT3L sequence set forth in GenBank Accession No. U03858.1.

[0381] In another embodiment, the FLT3L encoded by the third nucleotide sequence lacks the entire FLT3L transmembrane domain, 1, 2, 3, 4, 5, 6, 7, 8, 9, 10, 12, 13, 14, or 15 of the N-terminal amino acid residues of the cytoplasmic domain, and 1, 2, 3, 4, 5, 6, 7, 8, 9 or 10 amino acids from the carboxy-terminus of the FLT3L extracellular domain. In another embodiment, the FLT3L encoded by the third nucleotide sequence lacks the entire FLT3L transmembrane domain, 1, 2, 3, 4, 5, 6, 7, 8, 9, 10, 12, 13, 14, or 15 of the N-terminal amino acid residues of the cytoplasmic domain, and 11, 12, 13, 14, 15, 16, 17, 18, 19 or 20 amino acids from the carboxy-terminus of the FLT3L extracellular domain. In another embodiment, the FLT3L encoded by the third nucleotide sequence lacks the entire FLT3L transmembrane domain, 1, 2, 3, 4, 5, 6, 7, 8, 9, 10, 12, 13, 14, or 15 of the N-terminal amino acid residues of the cytoplasmic domain, and 1-5, 1-10, 5-10, 10-20, 15-20, 1-20, 5-20, or 10-20 amino acids from the carboxy-terminus of the FLT3L extracellular domain. In certain of the embodiments and aspects, the transmembrane, cytoplasmic and extracellular domains are of the FLT3L sequence set forth in GenBank Accession No. U03858.1.

[0382] In another embodiment, the FLT3L encoded by the third nucleotide sequence lacks at least 80%, at least 85%, at least 90%, or at least 95% of the FLT3L transmembrane domain, 1, 2, 3, 4, 5, 6, 7, 8, 9, 10, 12, 13, 14, or 15 of the N-terminal amino acid residues of the cytoplasmic domain, and 1, 2, 3, 4, 5, 6, 7, 8, 9 or 10 amino acids from the carboxy-terminus of the FLT3L extracellular domain. In another embodiment, the FLT3L encoded by the third nucleotide sequence lacks at least 80%, at least 85%, at least 90%, or at least 95% of the FLT3L transmembrane domain, 1, 2, 3, 4, 5, 6, 7, 8, 9, 10, 12, 13, 14, or 15 of the N-terminal amino acid residues of the cytoplasmic domain, and 11, 12, 13, 14, 15, 16, 17, 18, 19 or 20 amino acids from the carboxy-terminus of the FLT3L extracellular domain. In another embodiment, the FLT3L encoded by the third nucleotide sequence lacks at least 80%, at least 85%, at least 90%, or at least 95% of the FLT3L transmembrane domain, 1, 2, 3, 4, 5, 6, 7, 8, 9, 10, 12, 13, 14, or 15 of the N-terminal amino acid residues of the cytoplasmic domain, and 1-5, 1-10, 5-10, 10-20, 15-20, 1-20, 5-20, or 10-20 amino acids from the carboxy-terminus of the FLT3L extracellular domain. In certain of the embodiments and aspects, the transmembrane, cytoplasmic and extracellular domains are of the FLT3L sequence set forth in GenBank Accession No. U03858.1.

[0383] In a specific embodiment, the FLT3L encoded by the third nucleotide sequence is an X7 isoform and the third nucleotide sequence lacks a 179-nucleotide sequence as described in Lyman et al., 1994, Blood 83:2795-2801. In specific embodiments, the FLT3L comprises the amino acid sequence set forth in SEQ ID NO: 213. In specific embodiments, the third nucleotide sequence comprises the sequence set forth in SEQ ID NO: 216. In specific embodiments, the third nucleotide sequence is set forth in SEQ ID NO: 216.

[0384] In another aspect, provided here is a nucleic acid comprising a recombinant vaccinia virus genome, comprising: (a) deletions in the following genes: C2L, C1L, N1L, N2L, M1L, M2L, K1L, K2L, K3L, K4L, K5L, K6L, K7R, F1L, F2L, F3L, B14R, B15R, B 16R, B17L, B18R, B 19R, and B20R; (b) deletions in the following genes in the 3′ ITR: B21R, B22R, B23R, B24R, B25R, B26R, B27R, B28R, and B29R; (c) a second transgene comprising a second nucleotide sequence encoding an IL-12 polypeptide; and (d) a third transgene comprising a third nucleotide sequence encoding FLT3L; wherein the deletions in the C2L, F3L, B14R, and B29R vaccinia genes are partial deletions; and wherein the nucleic acid further comprises: (i) a nucleotide sequence comprising at least one promoter operably linked to the second nucleotide sequence, wherein the at least one promoter operably linked to the second nucleotide sequence is a late promoter; and/or (ii) a nucleotide sequence comprising at least one promoter operably linked to the third nucleotide sequence, wherein the at least one promoter operably linked to the third nucleotide sequence is a B8R promoter, a B19R promoter, a E3L promoter, an F11L promoter, and/or a B2R promoter. In specific embodiments, the nucleic acid further comprises a deletion in the B8R gene. In a particular embodiment, the B8R promoter comprises the nucleotide sequence of SEQ ID NO: 564. In a particular embodiment, the B19R promoter comprises the nucleotide sequence of SEQ ID NO: 565. In a particular embodiment, the E3L promoter comprises the nucleotide sequence of SEQ ID NO: 567. In a particular embodiment, the F11L promoter comprises the nucleotide sequence of SEQ ID NO: 568. In a particular embodiment, the B2R promoter comprises the nucleotide sequence of SEQ ID NO: 569.

[0385] In certain embodiments, the late promoter comprises the nucleotide sequence of SEQ ID NO: 561, an F17R promoter, or a D13L promoter. In a specific embodiment, the late promoter comprises the nucleotide sequence of SEQ ID NO: 561. In another embodiment, the F17R promoter comprises the nucleotide sequence of SEQ ID NO:563. In yet another embodiment, the D13L promoter comprises the nucleotide sequence of SEQ ID NO:562.

[0386] In certain embodiments, the at least one promoter operably linked to the third nucleotide sequence is a B8R promoter. In certain embodiments, the at least one promoter operably linked to the third nucleotide sequence is a B19R promoter. In certain embodiments, the at least one promoter operably linked to the third nucleotide sequence is a B8R promoter and a B19R promoter. In a particular embodiment, the B8R promoter comprises the nucleotide sequence of SEQ ID NO: 564. In a particular embodiment, the B19R promoter comprises the nucleotide sequence of SEQ ID NO: 565.

[0387] In some embodiments, when the flanking endogenous vaccinia virus genes of the second nucleotide sequence have the same orientation, the second nucleotide sequence is in the same orientation as the flanking endogenous vaccinia virus genes. In other embodiments, when the flanking endogenous vaccinia virus genes of the second nucleotide sequence have the same orientation, the second nucleotide sequence is in the reverse orientation relative to the flanking endogenous vaccinia virus genes. In other embodiments, when the flanking endogenous vaccinia virus genes of the second nucleotide sequence have opposite orientations, the second nucleotide sequence is in the same orientation as the flanking endogenous vaccinia virus gene that is closer to the 5′ end of the recombinant vaccinia virus genome. In other embodiments, when the flanking endogenous vaccinia virus genes of the second nucleotide sequence have opposite orientations, the second nucleotide sequence is in the same orientation as the flanking endogenous vaccinia virus gene that is closer to the 3′ end of the recombinant vaccinia virus genome. In a specific embodiment, the flanking endogenous vaccinia virus genes of the second nucleotide sequence are the C2L and F3L genes. In another specific embodiment, the flanking endogenous vaccinia virus genes of the second nucleotide sequence are the C3L and F4L genes. In another specific embodiment, the flanking endogenous vaccinia virus genes of the second nucleotide sequence are the B14R and B29R genes. In another specific embodiment, the flanking endogenous vaccinia virus genes of the second nucleotide sequence are the B13R and B29R genes. In yet another embodiment, the second nucleotide sequence is in the same orientation as an endogenous vaccinia gene adjacent to the second nucleotide sequence. In a specific embodiment, the endogenous vaccinia gene adjacent to the second nucleotide sequence is the B13R gene. In some embodiments, when the flanking endogenous vaccinia virus genes of the third nucleotide sequence have the same orientation, the third nucleotide sequence is in the same orientation as the flanking endogenous vaccinia virus genes. In other embodiments, when the flanking endogenous vaccinia virus genes of the third nucleotide sequence have the same orientation, the third nucleotide sequence is in the reverse orientation relative to the flanking endogenous vaccinia virus genes. In other embodiments, when the flanking endogenous vaccinia virus genes of the third nucleotide sequence have opposite orientations, the third nucleotide sequence is in the same orientation as the flanking endogenous vaccinia virus gene that is closer to the 5′ end of the recombinant vaccinia virus genome. In other embodiments, when the flanking endogenous vaccinia virus genes of the third nucleotide sequence have opposite orientations, the third nucleotide sequence is in the same orientation as the flanking endogenous vaccinia virus gene that is closer to the 3′ end of the recombinant vaccinia virus genome. In a specific embodiment, the flanking endogenous vaccinia virus genes of the third nucleotide sequence are the C2L and F3L genes. In another specific embodiment, the flanking endogenous vaccinia virus genes of the third nucleotide sequence are the C3L and F4L genes. In another specific embodiment, the flanking endogenous vaccinia virus genes of the third nucleotide sequence are the B14R and B29R genes. In another specific embodiment, the flanking endogenous vaccinia virus genes of the third nucleotide sequence are the B13R and B29R genes. In yet another embodiment, the third nucleotide sequence is in the same orientation as an endogenous vaccinia gene adjacent to the third nucleotide sequence. In a specific embodiment, the endogenous vaccinia gene adjacent to the third nucleotide sequence is the B13R gene. In specific embodiments, the IL-12 polypeptide is membrane-bound. In specific embodiments, the IL-12 polypeptide comprises IL-12 p35 (e.g., human IL-12 p35), IL-12 p40 (e.g., human IL-12 p40) or IL-12 p70 (e.g., human IL-12 p70). In specific embodiments, the IL-12 polypeptide is membrane-bound and comprises IL-12 p35 (e.g., human IL-12 p35), or IL-12 p70 (e.g., human IL-12 p70), and a transmembrane domain and a cytoplasmic domain (e.g., the transmembrane and cytoplasmic domains of B7-1, TNFα, or FLT3L). In specific embodiments, the IL-12 polypeptide comprises the amino acid sequence set forth in SEQ ID NO: 212. In specific embodiments, the second nucleotide sequence comprises the sequence set forth in SEQ ID NO: 215. In specific embodiments, the second nucleotide sequence is set forth in SEQ ID NO: 215.

[0388] In specific embodiments, the FLT3L encoded by the third nucleotide sequence is a soluble form of FLT3L. In particular embodiments, the FLT3L encoded by the third nucleotide sequence is a soluble form of human FLT3L. In certain embodiments, the FLT3L encoded by the third nucleotide sequence is a soluble form of the human FLT3L set forth in GenBank Accession No. U03858.1. For example, in specific embodiments, the FLT3L encoded by the third nucleotide sequence lacks the entire FLT3L transmembrane (e.g., the transmembrane domain of the human FLT3L set forth in GenBank Accession No. U03858.1). In other examples, the FLT3L encoded by the third nucleotide sequence lacks at least 80%, at least 85%, at least 90%, or at least 95% of the FLT3L transmembrane domain (e.g., the transmembrane domain of the human FLT3L set forth in GenBank Accession No. U03858.1). In one embodiment, the FLT3L encoded by the third nucleotide sequence lacks the entire FLT3L transmembrane domain and the entire FLT3L cytoplasmic domain. In another embodiment, the FLT3L encoded by the third nucleotide sequence lacks at least 80%, at least 85%, at least 90%, or at least 95% of the FLT3L transmembrane domain and the entire FLT3L cytoplasmic domain. In another embodiment, the FLT3L encoded by the third nucleotide sequence lacks at least 80%, at least 85%, at least 90%, or at least 95% of the FLT3L transmembrane domain and at least 25%, at least 30%, at least 40%, at least 50%, at least 60%, at least 70%, at least 80%, at least 85%, at least 90%, or at least 95% of the FLT3L cytoplasmic domain. In another embodiment, the FLT3L encoded by the third nucleotide sequence lacks the entire FLT3L transmembrane domain and 5, 6, 7, 8, 9, 10, 12, 13, 14, or 15 of the N-terminal amino acid residues of the FLT3L cytoplasmic domain. In another embodiment, the FLT3L encoded by the third nucleotide sequence lacks the entire FLT3L transmembrane domain and 1, 2, 3, or 4 of the N-terminal amino acid residues of the FLT3L cytoplasmic domain. In certain of the embodiments and aspects, the transmembrane and cytoplasmic domains are of the FLT3L sequence set forth in GenBank Accession No. U03858.1.

[0389] In another embodiment, the FLT3L encoded by the third nucleotide sequence lacks the entire FLT3L transmembrane domain and 1, 2, 3, 4, 5, 6, 7, 8, 9 or 10 amino acids from the carboxy-terminus of the FLT3L extracellular domain. In another embodiment, the FLT3L encoded by the third nucleotide sequence lacks the entire FLT3L transmembrane domain and 11, 12, 13, 14, 15, 16, 17, 18, 19 or 20 amino acids from the carboxy-terminus of the FLT3L extracellular domain. In another embodiment, the FLT3L encoded by the third nucleotide sequence lacks the entire FLT3L transmembrane domain and 1-5, 1-10, 5-10, 10-20, 15-20, 1-20, 5-20, or 10-20 amino acids from the carboxy-terminus of the FLT3L extracellular domain. In certain of the embodiments and aspects, the transmembrane and extracellular domains are of the FLT3L sequence set forth in GenBank Accession No. U03858.1.

[0390] In another embodiment, the FLT3L encoded by the third nucleotide sequence lacks at least 80%, at least 85%, at least 90%, or at least 95% of the FLT3L transmembrane domain and 1, 2, 3, 4, 5, 6, 7, 8, 9 or 10 amino acids from the carboxy-terminus of the FLT3L extracellular domain. In another embodiment, the FLT3L encoded by the third nucleotide sequence lacks at least 80%, at least 85%, at least 90%, or at least 95% of the FLT3L transmembrane domain and 11, 12, 13, 14, 15, 16, 17, 18, 19 or 20 amino acids from the carboxy-terminus of the FLT3L extracellular domain. In another embodiment, the FLT3L encoded by the third nucleotide sequence lacks at least 80%, at least 85%, at least 90%, or at least 95% of the FLT3L transmembrane domain and 1-5, 1-10, 5-10, 10-20, 15-20, 1-20, 5-20, or 10-20 amino acids from the carboxy-terminus of the FLT3L extracellular domain. In certain of the embodiments and aspects, the transmembrane and extracellular domains are of the FLT3L sequence set forth in GenBank Accession No. U03858.1.

[0391] In another embodiment, the FLT3L encoded by the third nucleotide sequence lacks the entire FLT3L transmembrane domain, the entire cytoplasmic domain, and 1, 2, 3, 4, 5, 6, 7, 8, 9 or 10 amino acids from the carboxy-terminus of the FLT3L extracellular domain. In another embodiment, the FLT3L encoded by the third nucleotide sequence lacks the entire FLT3L transmembrane domain, the entire cytoplasmic domain, and 11, 12, 13, 14, 15, 16, 17, 18, 19 or 20 amino acids from the carboxy-terminus of the FLT3L extracellular domain. In another embodiment, the FLT3L encoded by the third nucleotide sequence lacks the entire FLT3L transmembrane domain, the entire cytoplasmic domain, and 1-5, 1-10, 5-10, 10-20, 15-20, 1-20, 5-20, or 10-20 amino acids from the carboxy-terminus of the FLT3L extracellular domain. In certain of the embodiments and aspects, the transmembrane, cytoplasmic and extracellular domains are of the FLT3L sequence set forth in GenBank Accession No. U03858.1.

[0392] In another embodiment, the FLT3L encoded by the third nucleotide sequence lacks at least 25%, at least 30%, at least 40%, at least 50%, at least 60%, at least 70%, at least 80%, at least 85%, at least 90%, or at least 95% of the FLT3L transmembrane domain, the entire cytoplasmic domain, and 1, 2, 3, 4, 5, 6, 7, 8, 9 or 10 amino acids from the carboxy-terminus of the FLT3L extracellular domain. In another embodiment, the FLT3L encoded by the third nucleotide sequence lacks at least 25%, at least 30%, at least 40%, at least 50%, at least 60%, at least 70%, at least 80%, at least 85%, at least 90%, or at least 95% of the FLT3L transmembrane domain, the entire cytoplasmic domain, and 11, 12, 13, 14, 15, 16, 17, 18, 19 or 20 amino acids from the carboxy-terminus of the FLT3L extracellular domain. In another embodiment, the FLT3L encoded by the third nucleotide sequence lacks at least 25%, at least 30%, at least 40%, at least 50%, at least 60%, at least 70%, at least 80%, at least 85%, at least 90%, or at least 95% of the FLT3L transmembrane domain, the entire cytoplasmic domain, and 1-5, 1-10, 5-10, 10-20, 15-20, 1-20, 5-20, or 10-20 amino acids from the carboxy-terminus of the FLT3L extracellular domain. In certain of the embodiments and aspects, the transmembrane, cytoplasmic and extracellular domains are of the FLT3L sequence set forth in GenBank Accession No. U03858.1.

[0393] In another embodiment, the FLT3L encoded by the third nucleotide sequence lacks the entire FLT3L transmembrane domain, at least 25%, at least 30%, at least 40%, at least 50%, at least 60%, at least 70%, at least 80%, at least 85%, at least 90%, or at least 95% of the cytoplasmic domain, and 1, 2, 3, 4, 5, 6, 7, 8, 9 or 10 amino acids from the carboxy-terminus of the FLT3L extracellular domain. In another embodiment, the FLT3L encoded by the third nucleotide sequence lacks the entire FLT3L transmembrane domain, at least 25%, at least 30%, at least 40%, at least 50%, at least 60%, at least 70%, at least 80%, at least 85%, at least 90%, or at least 95% of the cytoplasmic domain, and 11, 12, 13, 14, 15, 16, 17, 18, 19 or 20 amino acids from the carboxy-terminus of the FLT3L extracellular domain. In another embodiment, the FLT3L encoded by the third nucleotide sequence lacks the entire FLT3L transmembrane domain, at least 25%, at least 30%, at least 40%, at least 50%, at least 60%, at least 70%, at least 80%, at least 85%, at least 90%, or at least 95% of the cytoplasmic domain, and 1-5, 1-10, 5-10, 10-20, 15-20, 1-20, 5-20, or 10-20 amino acids from the carboxy-terminus of the FLT3L extracellular domain. In certain of the embodiments and aspects, the transmembrane, cytoplasmic and extracellular domains are of the FLT3L sequence set forth in GenBank Accession No. U03858.1.

[0394] In another embodiment, the FLT3L encoded by the third nucleotide sequence lacks at least 80%, at least 85%, at least 90%, or at least 95% of the FLT3L transmembrane domain, at least 25%, at least 30%, at least 40%, at least 50%, at least 60%, at least 70%, at least 80%, at least 85%, at least 90%, or at least 95% of the cytoplasmic domain, and 1, 2, 3, 4, 5, 6, 7, 8, 9 or 10 amino acids from the carboxy-terminus of the FLT3L extracellular domain. In another embodiment, the FLT3L encoded by the third nucleotide sequence lacks at least 80%, at least 85%, at least 90%, or at least 95% of the FLT3L transmembrane domain, at least 25%, at least 30%, at least 40%, at least 50%, at least 60%, at least 70%, at least 80%, at least 85%, at least 90%, or at least 95% of the cytoplasmic domain, and 11, 12, 13, 14, 15, 16, 17, 18, 19 or 20 amino acids from the carboxy-terminus of the FLT3L extracellular domain. In another embodiment, the FLT3L encoded by the third nucleotide sequence lacks at least 80%, at least 85%, at least 90%, or at least 95% of the FLT3L transmembrane domain, at least 25%, at least 30%, at least 40%, at least 50%, at least 60%, at least 70%, at least 80%, at least 85%, at least 90%, or at least 95% of the cytoplasmic domain, and 1-5, 1-10, 5-10, 10-20, 15-20, 1-20, 5-20, or 10-20 amino acids from the carboxy-terminus of the FLT3L extracellular domain. In certain of the embodiments and aspects, the transmembrane, cytoplasmic and extracellular domains are of the FLT3L sequence set forth in GenBank Accession No. U03858.1.

[0395] In another embodiment, the FLT3L encoded by the third nucleotide sequence lacks the entire FLT3L transmembrane domain, 1, 2, 3, 4, 5, 6, 7, 8, 9, 10, 12, 13, 14, or 15 of the N-terminal amino acid residues of the cytoplasmic domain, and 1, 2, 3, 4, 5, 6, 7, 8, 9 or 10 amino acids from the carboxy-terminus of the FLT3L extracellular domain. In another embodiment, the FLT3L encoded by the third nucleotide sequence lacks the entire FLT3L transmembrane domain, 1, 2, 3, 4, 5, 6, 7, 8, 9, 10, 12, 13, 14, or 15 of the N-terminal amino acid residues of the cytoplasmic domain, and 11, 12, 13, 14, 15, 16, 17, 18, 19 or 20 amino acids from the carboxy-terminus of the FLT3L extracellular domain. In another embodiment, the FLT3L encoded by the third nucleotide sequence lacks the entire FLT3L transmembrane domain, 1, 2, 3, 4, 5, 6, 7, 8, 9, 10, 12, 13, 14, or 15 of the N-terminal amino acid residues of the cytoplasmic domain, and 1-5, 1-10, 5-10, 10-20, 15-20, 1-20, 5-20, or 10-20 amino acids from the carboxy-terminus of the FLT3L extracellular domain. In certain of the embodiments and aspects, the transmembrane, cytoplasmic and extracellular domains are of the FLT3L sequence set forth in GenBank Accession No. U03858.1.

[0396] In another embodiment, the FLT3L encoded by the third nucleotide sequence lacks at least 80%, at least 85%, at least 90%, or at least 95% of the FLT3L transmembrane domain, 1, 2, 3, 4, 5, 6, 7, 8, 9, 10, 12, 13, 14, or 15 of the N-terminal amino acid residues of the cytoplasmic domain, and 1, 2, 3, 4, 5, 6, 7, 8, 9 or 10 amino acids from the carboxy-terminus of the FLT3L extracellular domain. In another embodiment, the FLT3L encoded by the third nucleotide sequence lacks at least 80%, at least 85%, at least 90%, or at least 95% of the FLT3L transmembrane domain, 1, 2, 3, 4, 5, 6, 7, 8, 9, 10, 12, 13, 14, or 15 of the N-terminal amino acid residues of the cytoplasmic domain, and 11, 12, 13, 14, 15, 16, 17, 18, 19 or 20 amino acids from the carboxy-terminus of the FLT3L extracellular domain. In another embodiment, the FLT3L encoded by the third nucleotide sequence lacks at least 80%, at least 85%, at least 90%, or at least 95% of the FLT3L transmembrane domain, 1, 2, 3, 4, 5, 6, 7, 8, 9, 10, 12, 13, 14, or 15 of the N-terminal amino acid residues of the cytoplasmic domain, and 1-5, 1-10, 5-10, 10-20, 15-20, 1-20, 5-20, or 10-20 amino acids from the carboxy-terminus of the FLT3L extracellular domain. In certain of the embodiments and aspects, the transmembrane, cytoplasmic and extracellular domains are of the FLT3L sequence set forth in GenBank Accession No. U03858.1.

[0397] In a specific embodiment, the FLT3L encoded by the third nucleotide sequence is an X7 isoform and the third nucleotide sequence lacks a 179-nucleotide sequence as described in Lyman et al., 1994, Blood 83:2795-2801. In specific embodiments, the FLT3L comprises the amino acid sequence set forth in SEQ ID NO: 213. In specific embodiments, the third nucleotide sequence comprises the sequence set forth in SEQ ID NO: 216. In specific embodiments, the third nucleotide sequence is set forth in SEQ ID NO: 216.

[0398] In another aspect, provided herein is a nucleic acid comprising a recombinant vaccinia virus genome, comprising: (a) deletions in the following genes: C2L, C1L, N1L, N2L, M1L, M2L, K1L, K2L, K3L, K4L, K5L, K6L, K7R, F1L, F2L, F3L, B8R, B14R, B15R, B16R, B17L, B18R, B19R, and B20R; (b) deletions in the following genes in the 3′ ITR: B21R, B22R, B23R, B24R, B25R, B26R, B27R, B28R, and B29R; (c) a first transgene comprising a first nucleotide sequence encoding an antibody or antigen-binding fragment thereof that specifically binds to CTLA-4 (e.g., human CTLA-4); (d) a second transgene comprising a second nucleotide sequence encoding an IL-12 polypeptide; and (e) a third transgene comprising a third nucleotide sequence encoding FLT3L; wherein the deletions in the C2L, F3L, B14R, and B29R vaccinia genes are partial deletions.

[0399] In certain embodiments, the nucleic acid further comprises a nucleotide sequence comprising at least one promoter operably linked to the first nucleotide sequence. In a specific embodiment, the at least one promoter operably linked to the first nucleotide sequence is an H5R promoter, a pS promoter, or a LEO promoter. In another specific embodiment, the at least one promoter operably linked to the first nucleotide sequence is an H5R promoter (e.g., an early H5R promoter, a late H5R promoter, or an early H5R promoter and a late H5R promoter).

[0400] In certain embodiments, the nucleic acid further comprises a nucleotide sequence comprising at least one promoter operably linked to the second nucleotide sequence. In a specific embodiment, the at least one promoter operably linked to the second nucleotide sequence is a late promoter. In a further specific embodiment, the late promoter comprises the nucleotide sequence of SEQ ID NO: 561, an F17R promoter, or a D13L promoter. In another further specific embodiment, the late promoter comprises the nucleotide sequence of SEQ ID NO: 561. In another embodiment, the F17R promoter comprises the nucleotide sequence of SEQ ID NO:563. In yet another embodiment, the D13L promoter comprises the nucleotide sequence of SEQ ID NO:562.

[0401] In certain embodiments, the nucleic acid further comprises a nucleotide sequence comprising at least one promoter operably linked to the third nucleotide sequence. In a specific embodiment, the at least one promoter operably linked to the third nucleotide sequence is a B8R promoter, a B19R promoter, a E3L promoter, an F11L promoter, and/or a B2R promoter. In another specific embodiment, the at least one promoter operably linked to the third nucleotide sequence is a B8R promoter. In another specific embodiment, the at least one promoter operably linked to the third nucleotide sequence is a B19R promoter. In another specific embodiment, the at least one promoter operably linked to the third nucleotide sequence is a B8R promoter and a B19R promoter. In a particular embodiment, the B8R promoter comprises the nucleotide sequence of SEQ ID NO: 564. In a particular embodiment, the B19R promoter comprises the nucleotide sequence of SEQ ID NO: 565. In a particular embodiment, the E3L promoter comprises the nucleotide sequence of SEQ ID NO: 567. In a particular embodiment, the F11L promoter comprises the nucleotide sequence of SEQ ID NO: 568. In a particular embodiment, the B2R promoter comprises the nucleotide sequence of SEQ ID NO: 569.

[0402] In some embodiments, when the flanking endogenous vaccinia virus genes of the first nucleotide sequence have the same orientation, the first nucleotide sequence is in the same orientation as the flanking endogenous vaccinia virus genes. In other embodiments, when the flanking endogenous vaccinia virus genes of the first nucleotide sequence have the same orientation, the first nucleotide sequence is in the reverse orientation relative to the flanking endogenous vaccinia virus genes. In other embodiments, when the flanking endogenous vaccinia virus genes of the first nucleotide sequence have opposite orientations, the first nucleotide sequence is in the same orientation as the flanking endogenous vaccinia virus gene that is closer to the 5′ end of the recombinant vaccinia virus genome. In other embodiments, when the flanking endogenous vaccinia virus genes of the first nucleotide sequence have opposite orientations, the first nucleotide sequence is in the same orientation as the flanking endogenous vaccinia virus gene that is closer to the 3′ end of the recombinant vaccinia virus genome. In a specific embodiment, the flanking endogenous vaccinia virus genes of the first nucleotide sequence are the C2L and F3L genes. In another specific embodiment, the flanking endogenous vaccinia virus genes of the first nucleotide sequence are the C3L and F4L genes. In another specific embodiment, the flanking endogenous vaccinia virus genes of the first nucleotide sequence are the B14R and B29R genes. In another specific embodiment, the flanking endogenous vaccinia virus genes of the first nucleotide sequence are the B13R and B29R genes. In yet another embodiment, the first nucleotide sequence is in the same orientation as an endogenous vaccinia gene adjacent to the first nucleotide sequence. In a specific embodiment, the endogenous vaccinia gene adjacent to the first nucleotide sequence is the B13R gene. In some embodiments, when the flanking endogenous vaccinia virus genes of the second nucleotide sequence have the same orientation, the second nucleotide sequence is in the same orientation as the flanking endogenous vaccinia virus genes. In other embodiments, when the flanking endogenous vaccinia virus genes of the second nucleotide sequence have the same orientation, the second nucleotide sequence is in the reverse orientation relative to the flanking endogenous vaccinia virus genes. In other embodiments, when the flanking endogenous vaccinia virus genes of the second nucleotide sequence have opposite orientations, the second nucleotide sequence is in the same orientation as the flanking endogenous vaccinia virus gene that is closer to the 5′ end of the recombinant vaccinia virus genome. In other embodiments, when the flanking endogenous vaccinia virus genes of the second nucleotide sequence have opposite orientations, the second nucleotide sequence is in the same orientation as the flanking endogenous vaccinia virus gene that is closer to the 3′ end of the recombinant vaccinia virus genome. In a specific embodiment, the flanking endogenous vaccinia virus genes of the second nucleotide sequence are the C2L and F3L genes. In another specific embodiment, the flanking endogenous vaccinia virus genes of the second nucleotide sequence are the C3L and F4L genes. In another specific embodiment, the flanking endogenous vaccinia virus genes of the second nucleotide sequence are the B14R and B29R genes. In another specific embodiment, the flanking endogenous vaccinia virus genes of the second nucleotide sequence are the B13R and B29R genes. In yet another embodiment, the second nucleotide sequence is in the same orientation as an endogenous vaccinia gene adjacent to the second nucleotide sequence. In a specific embodiment, the endogenous vaccinia gene adjacent to the second nucleotide sequence is the B13R gene. In some embodiments, when the flanking endogenous vaccinia virus genes of the third nucleotide sequence have the same orientation, the third nucleotide sequence is in the same orientation as the flanking endogenous vaccinia virus genes. In other embodiments, when the flanking endogenous vaccinia virus genes of the third nucleotide sequence have the same orientation, the third nucleotide sequence is in the reverse orientation relative to the flanking endogenous vaccinia virus genes. In other embodiments, when the flanking endogenous vaccinia virus genes of the third nucleotide sequence have opposite orientations, the third nucleotide sequence is in the same orientation as the flanking endogenous vaccinia virus gene that is closer to the 5′ end of the recombinant vaccinia virus genome. In other embodiments, when the flanking endogenous vaccinia virus genes of the third nucleotide sequence have opposite orientations, the third nucleotide sequence is in the same orientation as the flanking endogenous vaccinia virus gene that is closer to the 3′ end of the recombinant vaccinia virus genome. In a specific embodiment, the flanking endogenous vaccinia virus genes of the third nucleotide sequence are the C2L and F3L genes. In another specific embodiment, the flanking endogenous vaccinia virus genes of the third nucleotide sequence are the C3L and F4L genes. In another specific embodiment, the flanking endogenous vaccinia virus genes of the third nucleotide sequence are the B14R and B29R genes. In another specific embodiment, the flanking endogenous vaccinia virus genes of the third nucleotide sequence are the B13R and B29R genes. In yet another embodiment, the third nucleotide sequence is in the same orientation as an endogenous vaccinia gene adjacent to the third nucleotide sequence. In a specific embodiment, the endogenous vaccinia gene adjacent to the third nucleotide sequence is the B13R gene.

[0403] In specific embodiments, the anti-CTLA-4 antibody or antigen-binding fragment thereof encoded by the first nucleotide sequence comprises the 6 complementarity-determining regions (CDRs) of ipilimumab. In specific embodiments, the first nucleotide sequence encodes an amino acid sequence comprising the amino acid sequence set forth in SEQ ID NO: 211. In specific embodiments, the first nucleotide sequence comprises the sequence set forth in SEQ ID NO: 214. In specific embodiments, the first nucleotide sequence is set forth in SEQ ID NO: 214.

[0404] In specific embodiments, the IL-12 polypeptide is membrane-bound. In specific embodiments, the IL-12 polypeptide comprises IL-12 p35 (e.g., human IL-12 p35), IL-12 p40 (e.g., human IL-12 p40) or IL-12 p70 (e.g., human IL-12 p70). In specific embodiments, the IL-12 polypeptide is membrane-bound and comprises IL-12 p35 (e.g., human IL-12 p35), or IL-12 p70 (e.g., human IL-12 p70), and a transmembrane domain and a cytoplasmic domain (e.g., the transmembrane and cytoplasmic domains of B7-1, TNFα, or FLT3L). In specific embodiments, the IL-12 polypeptide comprises the amino acid sequence set forth in SEQ ID NO: 212. In specific embodiments, the second nucleotide sequence comprises the sequence set forth in SEQ ID NO: 215. In specific embodiments, the second nucleotide sequence is set forth in SEQ ID NO: 215.

[0405] In specific embodiments, the FLT3L encoded by the third nucleotide sequence is a soluble form of FLT3L. In particular embodiments, the FLT3L encoded by the third nucleotide sequence is a soluble form of human FLT3L. In certain embodiments, the FLT3L encoded by the third nucleotide sequence is a soluble form of the human FLT3L set forth in GenBank Accession No. U03858.1. For example, in specific embodiments, the FLT3L encoded by the third nucleotide sequence lacks the entire FLT3L transmembrane (e.g., the transmembrane domain of the human FLT3L set forth in GenBank Accession No. U03858.1). In other examples, the FLT3L encoded by the third nucleotide sequence lacks at least 80%, at least 85%, at least 90%, or at least 95% of the FLT3L transmembrane domain (e.g., the transmembrane domain of the human FLT3L set forth in GenBank Accession No. U03858.1). In one embodiment, the FLT3L encoded by the third nucleotide sequence lacks the entire FLT3L transmembrane domain and the entire FLT3L cytoplasmic domain. In another embodiment, the FLT3L encoded by the third nucleotide sequence lacks at least 80%, at least 85%, at least 90%, or at least 95% of the FLT3L transmembrane domain and the entire FLT3L cytoplasmic domain. In another embodiment, the FLT3L encoded by the third nucleotide sequence lacks at least 80%, at least 85%, at least 90%, or at least 95% of the FLT3L transmembrane domain and at least 25%, at least 30%, at least 40%, at least 50%, at least 60%, at least 70%, at least 80%, at least 85%, at least 90%, or at least 95% of the FLT3L cytoplasmic domain. In another embodiment, the FLT3L encoded by the third nucleotide sequence lacks the entire FLT3L transmembrane domain and 5, 6, 7, 8, 9, 10, 12, 13, 14, or 15 of the N-terminal amino acid residues of the FLT3L cytoplasmic domain. In another embodiment, the FLT3L encoded by the third nucleotide sequence lacks the entire FLT3L transmembrane domain and 1, 2, 3, or 4 of the N-terminal amino acid residues of the FLT3L cytoplasmic domain. In certain of the embodiments and aspects, the transmembrane and cytoplasmic domains are of the FLT3L sequence set forth in GenBank Accession No. U03858.1.

[0406] In another embodiment, the FLT3L encoded by the third nucleotide sequence lacks the entire FLT3L transmembrane domain and 1, 2, 3, 4, 5, 6, 7, 8, 9 or 10 amino acids from the carboxy-terminus of the FLT3L extracellular domain. In another embodiment, the FLT3L encoded by the third nucleotide sequence lacks the entire FLT3L transmembrane domain and 11, 12, 13, 14, 15, 16, 17, 18, 19 or 20 amino acids from the carboxy-terminus of the FLT3L extracellular domain. In another embodiment, the FLT3L encoded by the third nucleotide sequence lacks the entire FLT3L transmembrane domain and 1-5, 1-10, 5-10, 10-20, 15-20, 1-20, 5-20, or 10-20 amino acids from the carboxy-terminus of the FLT3L extracellular domain. In certain of the embodiments and aspects, the transmembrane and extracellular domains are of the FLT3L sequence set forth in GenBank Accession No. U03858.1.

[0407] In another embodiment, the FLT3L encoded by the third nucleotide sequence lacks at least 80%, at least 85%, at least 90%, or at least 95% of the FLT3L transmembrane domain and 1, 2, 3, 4, 5, 6, 7, 8, 9 or 10 amino acids from the carboxy-terminus of the FLT3L extracellular domain. In another embodiment, the FLT3L encoded by the third nucleotide sequence lacks at least 80%, at least 85%, at least 90%, or at least 95% of the FLT3L transmembrane domain and 11, 12, 13, 14, 15, 16, 17, 18, 19 or 20 amino acids from the carboxy-terminus of the FLT3L extracellular domain. In another embodiment, the FLT3L encoded by the third nucleotide sequence lacks at least 80%, at least 85%, at least 90%, or at least 95% of the FLT3L transmembrane domain and 1-5, 1-10, 5-10, 10-20, 15-20, 1-20, 5-0, or 10-20 amino acids from the carboxy-terminus of the FLT3L extracellular domain. In certain of the embodiments and aspects, the transmembrane and extracellular domains are of the FLT3L sequence set forth in GenBank Accession No. U03858.1.

[0408] In another embodiment, the FLT3L encoded by the third nucleotide sequence lacks the entire FLT3L transmembrane domain, the entire cytoplasmic domain, and 1, 2, 3, 4, 5, 6, 7, 8, 9 or 10 amino acids from the carboxy-terminus of the FLT3L extracellular domain. In another embodiment, the FLT3L encoded by the third nucleotide sequence lacks the entire FLT3L transmembrane domain, the entire cytoplasmic domain, and 11, 12, 13, 14, 15, 16, 17, 18, 19 or 20 amino acids from the carboxy-terminus of the FLT3L extracellular domain. In another embodiment, the FLT3L encoded by the third nucleotide sequence lacks the entire FLT3L transmembrane domain, the entire cytoplasmic domain, and 1-5, 1-10, 5-10, 10-20, 15-20, 1-20, 5-20, or 10-20 amino acids from the carboxy-terminus of the FLT3L extracellular domain. In certain of the embodiments and aspects, the transmembrane, cytoplasmic and extracellular domains are of the FLT3L sequence set forth in GenBank Accession No. U03858.1.

[0409] In another embodiment, the FLT3L encoded by the third nucleotide sequence lacks at least 25%, at least 30%, at least 40%, at least 50%, at least 60%, at least 70%, at least 80%, at least 85%, at least 90%, or at least 95% of the FLT3L transmembrane domain, the entire cytoplasmic domain, and 1, 2, 3, 4, 5, 6, 7, 8, 9 or 10 amino acids from the carboxy-terminus of the FLT3L extracellular domain. In another embodiment, the FLT3L encoded by the third nucleotide sequence lacks at least 25%, at least 30%, at least 40%, at least 50%, at least 60%, at least 70%, at least 80%, at least 85%, at least 90%, or at least 95% of the FLT3L transmembrane domain, the entire cytoplasmic domain, and 11, 12, 13, 14, 15, 16, 17, 18, 19 or 20 amino acids from the carboxy-terminus of the FLT3L extracellular domain. In another embodiment, the FLT3L encoded by the third nucleotide sequence lacks at least 25%, at least 30%, at least 40%, at least 50%, at least 60%, at least 70%, at least 80%, at least 85%, at least 90%, or at least 95% of the FLT3L transmembrane domain, the entire cytoplasmic domain, and 1-5, 1-10, 5-10, 10-20, 15-20, 1-20, 5-20, or 10-20 amino acids from the carboxy-terminus of the FLT3L extracellular domain. In certain of the embodiments and aspects, the transmembrane, cytoplasmic and extracellular domains are of the FLT3L sequence set forth in GenBank Accession No. U03858.1.

[0410] In another embodiment, the FLT3L encoded by the third nucleotide sequence lacks the entire FLT3L transmembrane domain, at least 25%, at least 30%, at least 40%, at least 50%, at least 60%, at least 70%, at least 80%, at least 85%, at least 90%, or at least 95% of the cytoplasmic domain, and 1, 2, 3, 4, 5, 6, 7, 8, 9 or 10 amino acids from the carboxy-terminus of the FLT3L extracellular domain. In another embodiment, the FLT3L encoded by the third nucleotide sequence lacks the entire FLT3L transmembrane domain, at least 25%, at least 30%, at least 40%, at least 50%, at least 60%, at least 70%, at least 80%, at least 85%, at least 90%, or at least 95% of the cytoplasmic domain, and 11, 12, 13, 14, 15, 16, 17, 18, 19 or 20 amino acids from the carboxy-terminus of the FLT3L extracellular domain. In another embodiment, the FLT3L encoded by the third nucleotide sequence lacks the entire FLT3L transmembrane domain, at least 25%, at least 30%, at least 40%, at least 50%, at least 60%, at least 70%, at least 80%, at least 85%, at least 90%, or at least 95% of the cytoplasmic domain, and 1-5, 1-10, 5-10, 10-20, 15-20, 1-20, 5-20, or 10-20 amino acids from the carboxy-terminus of the FLT3L extracellular domain. In certain of the embodiments and aspects, the transmembrane, cytoplasmic and extracellular domains are of the FLT3L sequence set forth in GenBank Accession No. U03858.1.

[0411] In another embodiment, the FLT3L encoded by the third nucleotide sequence lacks at least 80%, at least 85%, at least 90%, or at least 95% of the FLT3L transmembrane domain, at least 25%, at least 30%, at least 40%, at least 50%, at least 60%, at least 70%, at least 80%, at least 85%, at least 90%, or at least 95% of the cytoplasmic domain, and 1, 2, 3, 4, 5, 6, 7, 8, 9 or 10 amino acids from the carboxy-terminus of the FLT3L extracellular domain. In another embodiment, the FLT3L encoded by the third nucleotide sequence lacks at least 80%, at least 85%, at least 90%, or at least 95% of the FLT3L transmembrane domain, at least 25%, at least 30%, at least 40%, at least 50%, at least 60%, at least 70%, at least 80%, at least 85%, at least 90%, or at least 95% of the cytoplasmic domain, and 11, 12, 13, 14, 15, 16, 17, 18, 19 or 20 amino acids from the carboxy-terminus of the FLT3L extracellular domain. In another embodiment, the FLT3L encoded by the third nucleotide sequence lacks at least 80%, at least 85%, at least 90%, or at least 95% of the FLT3L transmembrane domain, at least 25%, at least 30%, at least 40%, at least 50%, at least 60%, at least 70%, at least 80%, at least 85%, at least 90%, or at least 95% of the cytoplasmic domain, and 1-5, 1-10, 5-10, 10-20, 15-20, 1-20, 5-20, or 10-20 amino acids from the carboxy-terminus of the FLT3L extracellular domain. In certain of the embodiments and aspects, the transmembrane, cytoplasmic and extracellular domains are of the FLT3L sequence set forth in GenBank Accession No. U03858.1.

[0412] In another embodiment, the FLT3L encoded by the third nucleotide sequence lacks the entire FLT3L transmembrane domain, 1, 2, 3, 4, 5, 6, 7, 8, 9, 10, 12, 13, 14, or 15 of the N-terminal amino acid residues of the cytoplasmic domain, and 1, 2, 3, 4, 5, 6, 7, 8, 9 or 10 amino acids from the carboxy-terminus of the FLT3L extracellular domain. In another embodiment, the FLT3L encoded by the third nucleotide sequence lacks the entire FLT3L transmembrane domain, 1, 2, 3, 4, 5, 6, 7, 8, 9, 10, 12, 13, 14, or 15 of the N-terminal amino acid residues of the cytoplasmic domain, and 11, 12, 13, 14, 15, 16, 17, 18, 19 or 20 amino acids from the carboxy-terminus of the FLT3L extracellular domain. In another embodiment, the FLT3L encoded by the third nucleotide sequence lacks the entire FLT3L transmembrane domain, 1, 2, 3, 4, 5, 6, 7, 8, 9, 10, 12, 13, 14, or 15 of the N-terminal amino acid residues of the cytoplasmic domain, and 1-5, 1-10, 5-10, 10-20, 15-20, 1-20, 5-20, or 10-20 amino acids from the carboxy-terminus of the FLT3L extracellular domain. In certain of the embodiments and aspects, the transmembrane, cytoplasmic and extracellular domains are of the FLT3L sequence set forth in GenBank Accession No. U03858.1.

[0413] In another embodiment, the FLT3L encoded by the third nucleotide sequence lacks at least 80%, at least 85%, at least 90%, or at least 95% of the FLT3L transmembrane domain, 1, 2, 3, 4, 5, 6, 7, 8, 9, 10, 12, 13, 14, or 15 of the N-terminal amino acid residues of the cytoplasmic domain, and 1, 2, 3, 4, 5, 6, 7, 8, 9 or 10 amino acids from the carboxy-terminus of the FLT3L extracellular domain. In another embodiment, the FLT3L encoded by the third nucleotide sequence lacks at least 80%, at least 85%, at least 90%, or at least 95% of the FLT3L transmembrane domain, 1, 2, 3, 4, 5, 6, 7, 8, 9, 10, 12, 13, 14, or 15 of the N-terminal amino acid residues of the cytoplasmic domain, and 11, 12, 13, 14, 15, 16, 17, 18, 19 or 20 amino acids from the carboxy-terminus of the FLT3L extracellular domain. In another embodiment, the FLT3L encoded by the third nucleotide sequence lacks at least 80%, at least 85%, at least 90%, or at least 95% of the FLT3L transmembrane domain, 1, 2, 3, 4, 5, 6, 7, 8, 9, 10, 12, 13, 14, or 15 of the N-terminal amino acid residues of the cytoplasmic domain, and 1-5, 1-10, 5-10, 10-20, 15-20, 1-20, 5-20, or 10-20 amino acids from the carboxy-terminus of the FLT3L extracellular domain. In certain of the embodiments and aspects, the transmembrane, cytoplasmic and extracellular domains are of the FLT3L sequence set forth in GenBank Accession No. U03858.1.

[0414] In a specific embodiment, the FLT3L encoded by the third nucleotide sequence is an X7 isoform and the third nucleotide sequence lacks a 179-nucleotide sequence as described in Lyman et al., 1994, Blood 83:2795-2801. In specific embodiments, the FLT3L comprises the amino acid sequence set forth in SEQ ID NO: 213. In specific embodiments, the third nucleotide sequence comprises the sequence set forth in SEQ ID NO: 216. In specific embodiments, the third nucleotide sequence is set forth in SEQ ID NO: 216.

[0415] In another aspect, provided herein is a nucleic acid comprising a recombinant vaccinia virus genome, comprising: (a) deletions in the following genes: C2L, C1L, N1L, N2L, M1L, M2L, K1L, K2L, K3L, K4L, K5L, K6L, K7R, F1L, F2L, F3L, B14R, B15R, B 16R, B17L, B18R, B 19R, and B20R; (b) deletions in the following genes in the 3′ ITR: B21R, B22R, B23R, B24R, B25R, B26R, B27R, B28R, and B29R; (c) a first transgene comprising a first nucleotide sequence encoding an antibody or antigen-binding fragment thereof that specifically binds to CTLA-4 (e.g., human CTLA-4); (d) a second transgene comprising a second nucleotide sequence encoding an IL-12 polypeptide; and (e) a third transgene comprising a third nucleotide sequence encoding FLT3L; wherein the deletions in the C2L, F3L, B14R, and B29R vaccinia genes are partial deletions; and wherein the nucleic acid further comprises: (i) a nucleotide sequence comprising at least one promoter operably linked to the first nucleotide sequence, wherein the at least one promoter operably linked to the first nucleotide sequence is an H5R promoter, a pS promoter, or a LEO promoter; (ii) a nucleotide sequence comprising at least one promoter operably linked to the second nucleotide sequence, wherein the at least one promoter operably linked to the second nucleotide sequence is a late promoter; and/or (iii) a nucleotide sequence comprising at least one promoter operably linked to the third nucleotide sequence, wherein the at least one promoter operably linked to the third nucleotide sequence is a B8R promoter, a B19R promoter, a E3L promoter, an F11L promoter, and/or a B2R promoter. In specific embodiments, the nucleic acid further comprises a deletion in the B8R gene. In a particular embodiment, the B8R promoter comprises the nucleotide sequence of SEQ ID NO: 564. In a particular embodiment, the B19R promoter comprises the nucleotide sequence of SEQ ID NO: 565. In a particular embodiment, the E3L promoter comprises the nucleotide sequence of SEQ ID NO: 567. In a particular embodiment, the F11L promoter comprises the nucleotide sequence of SEQ ID NO: 568. In a particular embodiment, the B2R promoter comprises the nucleotide sequence of SEQ ID NO: 569.

[0416] In certain embodiments, the at least one promoter operably linked to the first nucleotide sequence is an H5R promoter (e.g., an early H5R promoter, a late H5R promoter, or an early H5R promoter and a late H5R promoter).

[0417] In certain embodiments, the late promoter comprises the nucleotide sequence of SEQ ID NO: 561, an F17R promoter, or a D13L promoter. In a specific embodiment, the late promoter comprises the nucleotide sequence of SEQ ID NO: 561. In another embodiment, the F17R promoter comprises the nucleotide sequence of SEQ ID NO:563. In yet another embodiment, the D13L promoter comprises the nucleotide sequence of SEQ ID NO:562.

[0418] In certain embodiments, the at least one promoter operably linked to the third nucleotide sequence is a B8R promoter. In certain embodiments, the at least one promoter operably linked to the third nucleotide sequence is a B19R promoter. In certain embodiments, the at least one promoter operably linked to the third nucleotide sequence is a B8R promoter and a B19R promoter. In a particular embodiment, the B8R promoter comprises the nucleotide sequence of SEQ ID NO: 564. In a particular embodiment, the B19R promoter comprises the nucleotide sequence of SEQ ID NO: 565

[0419] In some embodiments, when the flanking endogenous vaccinia virus genes of the first nucleotide sequence have the same orientation, the first nucleotide sequence is in the same orientation as the flanking endogenous vaccinia virus genes. In other embodiments, when the flanking endogenous vaccinia virus genes of the first nucleotide sequence have the same orientation, the first nucleotide sequence is in the reverse orientation relative to the flanking endogenous vaccinia virus genes. In other embodiments, when the flanking endogenous vaccinia virus genes of the first nucleotide sequence have opposite orientations, the first nucleotide sequence is in the same orientation as the flanking endogenous vaccinia virus gene that is closer to the 5′ end of the recombinant vaccinia virus genome. In other embodiments, when the flanking endogenous vaccinia virus genes of the first nucleotide sequence have opposite orientations, the first nucleotide sequence is in the same orientation as the flanking endogenous vaccinia virus gene that is closer to the 3′ end of the recombinant vaccinia virus genome. In a specific embodiment, the flanking endogenous vaccinia virus genes of the first nucleotide sequence are the C2L and F3L genes. In another specific embodiment, the flanking endogenous vaccinia virus genes of the first nucleotide sequence are the C3L and F4L genes. In another specific embodiment, the flanking endogenous vaccinia virus genes of the first nucleotide sequence are the B14R and B29R genes. In another specific embodiment, the flanking endogenous vaccinia virus genes of the first nucleotide sequence are the B13R and B29R genes. In yet another embodiment, the first nucleotide sequence is in the same orientation as an endogenous vaccinia gene adjacent to the first nucleotide sequence. In a specific embodiment, the endogenous vaccinia gene adjacent to the first nucleotide sequence is the B13R gene. In some embodiments, when the flanking endogenous vaccinia virus genes of the second nucleotide sequence have the same orientation, the second nucleotide sequence is in the same orientation as the flanking endogenous vaccinia virus genes. In other embodiments, when the flanking endogenous vaccinia virus genes of the second nucleotide sequence have the same orientation, the second nucleotide sequence is in the reverse orientation relative to the flanking endogenous vaccinia virus genes. In other embodiments, when the flanking endogenous vaccinia virus genes of the second nucleotide sequence have opposite orientations, the second nucleotide sequence is in the same orientation as the flanking endogenous vaccinia virus gene that is closer to the 5′ end of the recombinant vaccinia virus genome. In other embodiments, when the flanking endogenous vaccinia virus genes of the second nucleotide sequence have opposite orientations, the second nucleotide sequence is in the same orientation as the flanking endogenous vaccinia virus gene that is closer to the 3′ end of the recombinant vaccinia virus genome. In a specific embodiment, the flanking endogenous vaccinia virus genes of the second nucleotide sequence are the C2L and F3L genes. In another specific embodiment, the flanking endogenous vaccinia virus genes of the second nucleotide sequence are the C3L and F4L genes. In another specific embodiment, the flanking endogenous vaccinia virus genes of the second nucleotide sequence are the B14R and B29R genes. In another specific embodiment, the flanking endogenous vaccinia virus genes of the second nucleotide sequence are the B13R and B29R genes. In yet another embodiment, the second nucleotide sequence is in the same orientation as an endogenous vaccinia gene adjacent to the second nucleotide sequence. In a specific embodiment, the endogenous vaccinia gene adjacent to the second nucleotide sequence is the B13R gene. In some embodiments, when the flanking endogenous vaccinia virus genes of the third nucleotide sequence have the same orientation, the third nucleotide sequence is in the same orientation as the flanking endogenous vaccinia virus genes. In other embodiments, when the flanking endogenous vaccinia virus genes of the third nucleotide sequence have the same orientation, the third nucleotide sequence is in the reverse orientation relative to the flanking endogenous vaccinia virus genes. In other embodiments, when the flanking endogenous vaccinia virus genes of the third nucleotide sequence have opposite orientations, the third nucleotide sequence is in the same orientation as the flanking endogenous vaccinia virus gene that is closer to the 5′ end of the recombinant vaccinia virus genome. In other embodiments, when the flanking endogenous vaccinia virus genes of the third nucleotide sequence have opposite orientations, the third nucleotide sequence is in the same orientation as the flanking endogenous vaccinia virus gene that is closer to the 3′ end of the recombinant vaccinia virus genome. In a specific embodiment, the flanking endogenous vaccinia virus genes of the third nucleotide sequence are the C2L and F3L genes. In another specific embodiment, the flanking endogenous vaccinia virus genes of the third nucleotide sequence are the C3L and F4L genes. In another specific embodiment, the flanking endogenous vaccinia virus genes of the third nucleotide sequence are the B14R and B29R genes. In another specific embodiment, the flanking endogenous vaccinia virus genes of the third nucleotide sequence are the B13R and B29R genes. In yet another embodiment, the third nucleotide sequence is in the same orientation as an endogenous vaccinia gene adjacent to the third nucleotide sequence. In a specific embodiment, the endogenous vaccinia gene adjacent to the third nucleotide sequence is the B13R gene.

[0420] In specific embodiments, the anti-CTLA-4 antibody or antigen-binding fragment thereof encoded by the first nucleotide sequence comprises the 6 complementarity-determining regions (CDRs) of ipilimumab. In specific embodiments, the first nucleotide sequence encodes an amino acid sequence comprising the amino acid sequence set forth in SEQ ID NO: 211. In specific embodiments, the first nucleotide sequence comprises the sequence set forth in SEQ ID NO: 214. In specific embodiments, the first nucleotide sequence is set forth in SEQ ID NO: 214.

[0421] In specific embodiments, the IL-12 polypeptide is membrane-bound. In specific embodiments, the IL-12 polypeptide comprises IL-12 p35 (e.g., human IL-12 p35), IL-12 p40 (e.g., human IL-12 p40) or IL-12 p70 (e.g., human IL-12 p70). In specific embodiments, the IL-12 polypeptide is membrane-bound and comprises IL-12 p35 (e.g., human IL-12 p35), or IL-12 p70 (e.g., human IL-12 p70)0, and a transmembrane domain and a cytoplasmic domain (e.g., the transmembrane and cytoplasmic domains of B7-1, TNFα, or FLT3L). In specific embodiments, the IL-12 polypeptide comprises the amino acid sequence set forth in SEQ ID NO: 212. In specific embodiments, the second nucleotide sequence comprises the sequence set forth in SEQ ID NO: 215. In specific embodiments, the second nucleotide sequence is set forth in SEQ ID NO: 215.

[0422] In specific embodiments, the FLT3L encoded by the third nucleotide sequence is a soluble form of FLT3L. In particular embodiments, the FLT3L encoded by the third nucleotide sequence is a soluble form of human FLT3L. In certain embodiments, the FLT3L encoded by the third nucleotide sequence is a soluble form of the human FLT3L set forth in GenBank Accession No. U03858.1. For example, in specific embodiments, the FLT3L encoded by the third nucleotide sequence lacks the entire FLT3L transmembrane (e.g., the transmembrane domain of the human FLT3L set forth in GenBank Accession No. U03858.1). In other examples, the FLT3L encoded by the third nucleotide sequence lacks at least 80%, at least 85%, at least 90%, or at least 95% of the FLT3L transmembrane domain (e.g., the transmembrane domain of the human FLT3L set forth in GenBank Accession No. U03858.1). In one embodiment, the FLT3L encoded by the third nucleotide sequence lacks the entire FLT3L transmembrane domain and the entire FLT3L cytoplasmic domain. In another embodiment, the FLT3L encoded by the third nucleotide sequence lacks at least 80%, at least 85%, at least 90%, or at least 95% of the FLT3L transmembrane domain and the entire FLT3L cytoplasmic domain. In another embodiment, the FLT3L encoded by the third nucleotide sequence lacks at least 80%, at least 85%, at least 90%, or at least 95% of the FLT3L transmembrane domain and at least 25%, at least 30%, at least 40%, at least 50%, at least 60%, at least 70%, at least 80%, at least 85%, at least 90%, or at least 95% of the FLT3L cytoplasmic domain. In another embodiment, the FLT3L encoded by the third nucleotide sequence lacks the entire FLT3L transmembrane domain and 5, 6, 7, 8, 9, 10, 12, 13, 14, or 15 of the N-terminal amino acid residues of the FLT3L cytoplasmic domain. In another embodiment, the FLT3L encoded by the third nucleotide sequence lacks the entire FLT3L transmembrane domain and 1, 2, 3, or 4 of the N-terminal amino acid residues of the FLT3L cytoplasmic domain. In certain of the embodiments and aspects, the transmembrane and cytoplasmic domains are of the FLT3L sequence set forth in GenBank Accession No. U03858.1.

[0423] In another embodiment, the FLT3L encoded by the third nucleotide sequence lacks the entire FLT3L transmembrane domain and 1, 2, 3, 4, 5, 6, 7, 8, 9 or 10 amino acids from the carboxy-terminus of the FLT3L extracellular domain. In another embodiment, the FLT3L encoded by the third nucleotide sequence lacks the entire FLT3L transmembrane domain and 11, 12, 13, 14, 15, 16, 17, 18, 19 or 20 amino acids from the carboxy-terminus of the FLT3L extracellular domain. In another embodiment, the FLT3L encoded by the third nucleotide sequence lacks the entire FLT3L transmembrane domain and 1-5, 1-10, 5-10, 10-20, 15-20, 1-20, 5-20, or 10-20 amino acids from the carboxy-terminus of the FLT3L extracellular domain. In certain of the embodiments and aspects, the transmembrane and extracellular domains are of the FLT3L sequence set forth in GenBank Accession No. U03858.1.

[0424] In another embodiment, the FLT3L encoded by the third nucleotide sequence lacks at least 80%, at least 85%, at least 90%, or at least 95% of the FLT3L transmembrane domain and 1, 2, 3, 4, 5, 6, 7, 8, 9 or 10 amino acids from the carboxy-terminus of the FLT3L extracellular domain. In another embodiment, the FLT3L encoded by the third nucleotide sequence lacks at least 80%, at least 85%, at least 90%, or at least 95% of the FLT3L transmembrane domain and 11, 12, 13, 14, 15, 16, 17, 18, 19 or 20 amino acids from the carboxy-terminus of the FLT3L extracellular domain. In another embodiment, the FLT3L encoded by the third nucleotide sequence lacks at least 80%, at least 85%, at least 90%, or at least 95% of the FLT3L transmembrane domain and 1-5, 1-10, 5-10, 10-20, 15-20, 1-20, 5-20, or 10-20 amino acids from the carboxy-terminus of the FLT3L extracellular domain. In certain of the embodiments and aspects, the transmembrane and extracellular domains are of the FLT3L sequence set forth in GenBank Accession No. U03858.1.

[0425] In another embodiment, the FLT3L encoded by the third nucleotide sequence lacks the entire FLT3L transmembrane domain, the entire cytoplasmic domain, and 1, 2, 3, 4, 5, 6, 7, 8, 9 or 10 amino acids from the carboxy-terminus of the FLT3L extracellular domain. In another embodiment, the FLT3L encoded by the third nucleotide sequence lacks the entire FLT3L transmembrane domain, the entire cytoplasmic domain, and 11, 12, 13, 14, 15, 16, 17, 18, 19 or 20 amino acids from the carboxy-terminus of the FLT3L extracellular domain. In another embodiment, the FLT3L encoded by the third nucleotide sequence lacks the entire FLT3L transmembrane domain, the entire cytoplasmic domain, and 1-5, 1-10, 5-10, 10-20, 15-20, 1-20, 5-20, or 10-20 amino acids from the carboxy-terminus of the FLT3L extracellular domain. In certain of the embodiments and aspects, the transmembrane, cytoplasmic and extracellular domains are of the FLT3L sequence set forth in GenBank Accession No. U03858.1.

[0426] In another embodiment, the FLT3L encoded by the third nucleotide sequence lacks at least 25%, at least 30%, at least 40%, at least 50%, at least 60%, at least 70%, at least 80%, at least 85%, at least 90%, or at least 95% of the FLT3L transmembrane domain, the entire cytoplasmic domain, and 1, 2, 3, 4, 5, 6, 7, 8, 9 or 10 amino acids from the carboxy-terminus of the FLT3L extracellular domain. In another embodiment, the FLT3L encoded by the third nucleotide sequence lacks at least 25%, at least 30%, at least 40%, at least 50%, at least 60%, at least 70%, at least 80%, at least 85%, at least 90%, or at least 95% of the FLT3L transmembrane domain, the entire cytoplasmic domain, and 11, 12, 13, 14, 15, 16, 17, 18, 19 or 20 amino acids from the carboxy-terminus of the FLT3L extracellular domain. In another embodiment, the FLT3L encoded by the third nucleotide sequence lacks at least 25%, at least 30%, at least 40%, at least 50%, at least 60%, at least 70%, at least 80%, at least 85%, at least 90%, or at least 95% of the FLT3L transmembrane domain, the entire cytoplasmic domain, and 1-5, 1-10, 5-10, 10-20, 15-20, 1-20, 5-20, or 10-20 amino acids from the carboxy-terminus of the FLT3L extracellular domain. In certain of the embodiments and aspects, the transmembrane, cytoplasmic and extracellular domains are of the FLT3L sequence set forth in GenBank Accession No. U03858.1.

[0427] In another embodiment, the FLT3L encoded by the third nucleotide sequence lacks the entire FLT3L transmembrane domain, at least 25%, at least 30%, at least 40%, at least 50%, at least 60%, at least 70%, at least 80%, at least 85%, at least 90%, or at least 95% of the cytoplasmic domain, and 1, 2, 3, 4, 5, 6, 7, 8, 9 or 10 amino acids from the carboxy-terminus of the FLT3L extracellular domain. In another embodiment, the FLT3L encoded by the third nucleotide sequence lacks the entire FLT3L transmembrane domain, at least 25%, at least 30%, at least 40%, at least 50%, at least 60%, at least 70%, at least 80%, at least 85%, at least 90%, or at least 95% of the cytoplasmic domain, and 11, 12, 13, 14, 15, 16, 17, 18, 19 or 20 amino acids from the carboxy-terminus of the FLT3L extracellular domain. In another embodiment, the FLT3L encoded by the third nucleotide sequence lacks the entire FLT3L transmembrane domain, at least 25%, at least 30%, at least 40%, at least 50%, at least 60%, at least 70%, at least 80%, at least 85%, at least 90%, or at least 95% of the cytoplasmic domain, and 1-5, 1-10, 5-10, 10-20, 15-20, 1-20, 5-20, or 10-20 amino acids from the carboxy-terminus of the FLT3L extracellular domain. In certain of the embodiments and aspects, the transmembrane, cytoplasmic and extracellular domains are of the FLT3L sequence set forth in GenBank Accession No. U03858.1.

[0428] In another embodiment, the FLT3L encoded by the third nucleotide sequence lacks at least 80%, at least 85%, at least 90%, or at least 95% of the FLT3L transmembrane domain, at least 25%, at least 30%, at least 40%, at least 50%, at least 60%, at least 70%, at least 80%, at least 85%, at least 90%, or at least 95% of the cytoplasmic domain, and 1, 2, 3, 4, 5, 6, 7, 8, 9 or 10 amino acids from the carboxy-terminus of the FLT3L extracellular domain. In another embodiment, the FLT3L encoded by the third nucleotide sequence lacks at least 80%, at least 85%, at least 90%, or at least 95% of the FLT3L transmembrane domain, at least 25%, at least 30%, at least 40%, at least 50%, at least 60%, at least 70%, at least 80%, at least 85%, at least 90%, or at least 95% of the cytoplasmic domain, and 11, 12, 13, 14, 15, 16, 17, 18, 19 or 20 amino acids from the carboxy-terminus of the FLT3L extracellular domain. In another embodiment, the FLT3L encoded by the third nucleotide sequence lacks at least 80%, at least 85%, at least 90%, or at least 95% of the FLT3L transmembrane domain, at least 25%, at least 30%, at least 40%, at least 50%, at least 60%, at least 70%, at least 80%, at least 85%, at least 90%, or at least 95% of the cytoplasmic domain, and 1-5, 1-10, 5-10, 10-20, 15-20, 1-20, 5-20, or 10-20 amino acids from the carboxy-terminus of the FLT3L extracellular domain. In certain of the embodiments and aspects, the transmembrane, cytoplasmic and extracellular domains are of the FLT3L sequence set forth in GenBank Accession No. U03858.1.

[0429] In another embodiment, the FLT3L encoded by the third nucleotide sequence lacks the entire FLT3L transmembrane domain, 1, 2, 3, 4, 5, 6, 7, 8, 9, 10, 12, 13, 14, or 15 of the N-terminal amino acid residues of the cytoplasmic domain, and 1, 2, 3, 4, 5, 6, 7, 8, 9 or 10 amino acids from the carboxy-terminus of the FLT3L extracellular domain. In another embodiment, the FLT3L encoded by the third nucleotide sequence lacks the entire FLT3L transmembrane domain, 1, 2, 3, 4, 5, 6, 7, 8, 9, 10, 12, 13, 14, or 15 of the N-terminal amino acid residues of the cytoplasmic domain, and 11, 12, 13, 14, 15, 16, 17, 18, 19 or 20 amino acids from the carboxy-terminus of the FLT3L extracellular domain. In another embodiment, the FLT3L encoded by the third nucleotide sequence lacks the entire FLT3L transmembrane domain, 1, 2, 3, 4, 5, 6, 7, 8, 9, 10, 12, 13, 14, or 15 of the N-terminal amino acid residues of the cytoplasmic domain, and 1-5, 1-10, 5-10, 10-20, 15-20, 1-20, 5-20, or 10-20 amino acids from the carboxy-terminus of the FLT3L extracellular domain. In certain of the embodiments and aspects, the transmembrane, cytoplasmic and extracellular domains are of the FLT3L sequence set forth in GenBank Accession No. U03858.1.

[0430] In another embodiment, the FLT3L encoded by the third nucleotide sequence lacks at least 80%, at least 85%, at least 90%, or at least 95% of the FLT3L transmembrane domain, 1, 2, 3, 4, 5, 6, 7, 8, 9, 10, 12, 13, 14, or 15 of the N-terminal amino acid residues of the cytoplasmic domain, and 1, 2, 3, 4, 5, 6, 7, 8, 9 or 10 amino acids from the carboxy-terminus of the FLT3L extracellular domain. In another embodiment, the FLT3L encoded by the third nucleotide sequence lacks at least 80%, at least 85%, at least 90%, or at least 95% of the FLT3L transmembrane domain, 1, 2, 3, 4, 5, 6, 7, 8, 9, 10, 12, 13, 14, or 15 of the N-terminal amino acid residues of the cytoplasmic domain, and 11, 12, 13, 14, 15, 16, 17, 18, 19 or 20 amino acids from the carboxy-terminus of the FLT3L extracellular domain. In another embodiment, the FLT3L encoded by the third nucleotide sequence lacks at least 80%, at least 85%, at least 90%, or at least 95% of the FLT3L transmembrane domain, 1, 2, 3, 4, 5, 6, 7, 8, 9, 10, 12, 13, 14, or 15 of the N-terminal amino acid residues of the cytoplasmic domain, and 1-5, 1-10, 5-10, 10-20, 15-20, 1-20, 5-20, or 10-20 amino acids from the carboxy-terminus of the FLT3L extracellular domain. In certain of the embodiments and aspects, the transmembrane, cytoplasmic and extracellular domains are of the FLT3L sequence set forth in GenBank Accession No. U03858.1.

[0431] In a specific embodiment, the FLT3L encoded by the third nucleotide sequence is an X7 isoform and the third nucleotide sequence lacks a 179-nucleotide sequence as described in Lyman et al., 1994, Blood 83:2795-2801. In specific embodiments, the FLT3L comprises the amino acid sequence set forth in SEQ ID NO: 213. In specific embodiments, the third nucleotide sequence comprises the sequence set forth in SEQ ID NO: 216. In specific embodiments, the third nucleotide sequence is set forth in SEQ ID NO: 216.

[0432] In a specific embodiment, the first transgene is inserted between the partial C2L and F3L vaccinia genes, and the second transgene and the third transgene are inserted into the locus of the deletion in the B8R gene. In a further specific embodiment, the third transgene is upstream of the second transgene.

[0433] In some embodiments of the various embodiments and aspects described herein, the deletion in the B8R gene is a deletion of at least 30% of the B8R gene sequence. In other embodiments, the deletion in the B8R gene is a deletion of at least 40% of the B8R gene sequence. In other embodiments, the deletion in the B8R gene is a deletion of at least 50% of the B8R gene sequence. In other embodiments, the deletion in the B8R gene is a deletion of at least 60% of the B8R gene sequence. In other embodiments, the deletion in the B8R gene is a deletion of at least 70% of the B8R gene sequence. In other embodiments, the deletion in the B8R gene is a deletion of at least 80% of the B8R gene sequence. In other embodiments, the deletion in the B8R gene is a deletion of 30% -90%, 30%-85%, 40%-90%, 40%-85%, 50%-90%, 50%-85%, 60%-90%, 60%-85%, 70%-90%, 70%-85%, 75%-90%, 75%-85%, or 80%-85% of the B8R gene sequence. In a specific embodiment, the deletion in the B8R gene is a deletion of about 75% of the B8R gene sequence. In another specific embodiment, the deletion in the B8R gene is a deletion of about 80% of the B8R gene sequence. In another specific embodiment, the deletion in the B8R gene is a deletion of about 82% of the B8R gene sequence.

[0434] For example, in some embodiments, the deletion in the B8R gene is a deletion of at least 30% of the nucleotide sequence of SEQ ID NO: 591. In other embodiments, the deletion in the B8R gene is a deletion of at least 40% of the nucleotide sequence of SEQ ID NO: 591. In other embodiments, the deletion in the B8R gene is a deletion of at least 50% of the nucleotide sequence of SEQ ID NO: 591. In other embodiments, the deletion in the B8R gene is a deletion of at least 60% of the nucleotide sequence of SEQ ID NO: 591. In other embodiments, the deletion in the B8R gene is a deletion of at least 70% of the nucleotide sequence of SEQ ID NO: 591. In other embodiments, the deletion in the B8R gene is a deletion of at least 80% of the nucleotide sequence of SEQ ID NO: 591. In other embodiments, the deletion in the B8R gene is a deletion of 30% -90%, 30%-85%, 40%-90%, 40%-85%, 50%-90%, 50%-85%, 60%-90%, 60%-85%, 70%-90%, 70%-85%, 75%-90%, 75%-85%, or 80%-85% of the nucleotide sequence of SEQ ID NO: 591. In a specific embodiment, the deletion in the B8R gene is a deletion of about 75% of the nucleotide sequence of SEQ ID NO: 591. In another specific embodiment, the deletion in the B8R gene is a deletion of about 80% of the nucleotide sequence of SEQ ID NO: 591. In another specific embodiment, the deletion in the B8R gene is a deletion of about 82% of the nucleotide sequence of SEQ ID NO: 591.

[0435] In another example, in some embodiments, the deletion in the B8R gene is a deletion of at least 30% of the nucleotide sequence of ACAACACCATGAGATATATTATA ATTCTCGCAGTTTTGTTCATTAATAGTATACACGCTAAAATAACTAGTTATAAGTT TGAATCCGTCAATTTTGATTCCAAAATTGAATGGACTGGGGATGGTCTATACAAT ATATCCCTTAAAAATTATGGCATCAAGACGTGGCAAACAATGTATACAAATGTAC CAGAAGGAACATACGACATATCCGCATTTCCAAAGAATGATTTCGTATCTTTCTG GGTTAAATTTGAACAAGGCGATTATAAAGTGGAAGAGTATTGTACGGGACTATG CGTCGAAGTAAAAATTGGACCACCGACTGTAACATTGACTGAATACGACGACCA TATCAATTTGTACATCGAGCATCCGTATGCTACTAGAGGTAGCAAAAAGATTCCT ATTTACAAACGCGGTGACATGTGTGATATCTACTTGTTGTATACGGCTAACTTCA CATTCGGAGATTCTGAAGAACCAGTAACATATGATATCGATGACTACGATTGCAC GTCTACAGGTTGCAGCATAGACTTTGCCACAACAGAAAAAGTGTGCGTGACAGC ACAGGGAGCCACAGAAGGGTTTCTCGAAAAAATTACTCCATGGAGTTCGGAAGT ATGTCTGACACCTAAAAAGAATGTATATACATGTGCAATTAGATCCAAAGAAGA TGTTCCCAATTTCAAGGACAAAATGGCCAGAGTTATCAAGAGAAAATTTAATAA ACAGTCTCAATCTTATTTAACTAAATTTCTCGGTAGCACATCAAATGATGTTACC ACTTTTCTTAGCATGCTTAACTTGACTAAATATTCATAA (SEQ ID NO: 550. In other embodiments, the deletion in the B8R gene is a deletion of at least 40% of the nucleotide sequence of SEQ ID NO: 550. In other embodiments, the deletion in the B8R gene is a deletion of at least 50% of the nucleotide sequence of SEQ ID NO: 550. In other embodiments, the deletion in the B8R gene is a deletion of at least 60% of the nucleotide sequence of SEQ ID NO: 550. In other embodiments, the deletion in the B8R gene is a deletion of at least 70% of the nucleotide sequence of SEQ ID NO: 550. In other embodiments, the deletion in the B8R gene is a deletion of at least 80% of the nucleotide sequence of SEQ ID NO: 550. In other embodiments, the deletion in the B8R gene is a deletion of 30% -90%, 30%-85%, 40%-90%, 40%-85%, 50%-90%, 50%-85%, 60%-90%, 60%-85%, 70%-90%, 70%-85%, 75%-90%, 75%-85%, or 80%-85% of the nucleotide sequence of SEQ ID NO: 550. In a specific embodiment, the deletion in the B8R gene is a deletion of about 75% of the nucleotide sequence of SEQ ID NO: 550. In another specific embodiment, the deletion in the B8R gene is a deletion of about 80% of the nucleotide sequence of SEQ ID NO: 550. In another specific embodiment, the deletion in the B8R gene is a deletion of about 82% of the nucleotide sequence of SEQ ID NO: 550.

[0436] In certain embodiments, the deletion in the B8R gene does not disturb the function of the B9R gene of the vaccinia genome. In certain embodiments, the deletion in the B8R gene does not disturb the expression of the B9R gene. In certain embodiments, the deletion in the B8R gene does not remove the promoter(s) of the B9R gene. In certain embodiments, the deletion in the B8R gene does not remove the transcriptional regulatory sequences of the B9R gene. In a specific embodiment, the only sequence of the B8R gene that remains after deletion is the sequence necessary for proper B9R function and/or expression. In a specific embodiment, the deletion in the B8R gene does not remove a nucleotide sequence comprising AAAATTTAATAAACA (SEQ ID NO: 551). In another specific embodiment, the deletion in the B8R gene does not remove the nucleotide sequence AAAATTTAATAAACA (SEQ ID NO: 551). In a specific embodiment, the only sequence of the B8R gene that remains is the nucleotide sequence of

(SEQ ID NO: 552)
GATGTTCCCAATTTCAAGGACAAAATGGCCAGAGTTATCAAGAGAAAAT
TTAATAAACAGTCTCAATCTTATTTAACTAAATTTCTCGGTAGCACATC
AAATGATGTTACCACTTTTCTTAGCATGCTTAACTTGACTAAATATTCA
TAA.

[0437] In certain embodiments of the various embodiments and aspects described herein, the recombinant vaccinia virus genome is derived from the genome of a Copenhagen strain vaccinia virus. In certain embodiments of the various embodiments and aspects described herein, the recombinant vaccinia virus genome is derived from the nucleotide sequence of GenBank Accession No. M35027.1 (SEQ ID NO: 590). In certain embodiments of the various embodiments and aspects described herein, the recombinant vaccinia virus genome comprises the nucleotide sequence of GenBank Accession No. M35027.1 (SEQ ID NO: 590). In certain of the embodiments and aspects provided herein, the recombinant vaccinia virus genome comprises a nucleotide sequence identical to the nucleotide sequence of GenBank Accession No. M35027.1 (SEQ ID NO: 590) except that the nucleotide sequence comprises 1, 2, 3, 4, 5, 6, 7, 8, 9, 10 of the nucleotide polymorphisms identified in Table 46. In some embodiments of the embodiments and aspects provided herein, the recombinant vaccinia virus genome comprises a nucleotide sequence identical to the nucleotide sequence of GenBank Accession No. M35027.1 (SEQ ID NO: 590) except that the nucleotide sequence comprises 1-3, 1-5, 2-4, 2-5, 1-9, 2-8, 4-8, 6-8, 1-9, 2-9, 4-9, 6-9, 7-9, 1-10, 2-10, 5-10, or 8-10 of the nucleotide polymorphisms identified in Table 46. In certain of the embodiments and aspects provided herein, the recombinant vaccinia virus genome comprises a nucleotide sequence identical to the nucleotide sequence of GenBank Accession No. M35027.1 (SEQ ID NO: 590) except that the nucleotide sequence comprises 11, 12, 13, 14, 15, 16, 17, 18, 19 or 20 of the nucleotide polymorphisms identified in Table 46. In some embodiments of the embodiments and aspects provided herein, the recombinant vaccinia virus genome comprises a nucleotide sequence identical to the nucleotide sequence of GenBank Accession No. M35027.1 (SEQ ID NO: 590) except that the nucleotide sequence comprises 11-20, 12-15, 15-20, or 18-20 of the nucleotide polymorphisms identified in Table 46. In certain embodiments of the embodiments and aspects provided herein, the recombinant vaccinia virus genome comprises a nucleotide sequence identical to the nucleotide sequence of GenBank Accession No. M35027.1 (SEQ ID NO: 590) except that the nucleotide sequence comprises 1-20, 1-15, 5-20, or 10-20 of the nucleotide polymorphisms identified in Table 46. In some of the embodiments and aspects provided herein, the recombinant vaccinia virus genome comprises a nucleotide sequence identical to the nucleotide sequence of GenBank Accession No. M35027.1 (SEQ ID NO: 590) except that the nucleotide sequence comprises all of the nucleotide polymorphisms identified in Table 46. In certain of such embodiments, the recombinant vaccinia virus genome may be engineered to comprise 1, 2, 3, 4, 5, 6, 7, 8, 9, or 10 of the deletions in the vaccinia virus genes identified herein (e.g., C2L, C1L, N1L, N2L, M1L, M2L, K1L, K2L, K3L, K4L, K5L, K6L, K7R, F1L, F2L, F3L, B8R, B14R, B15R, B16R, B17L, B18R, B19R, B20R, B21R, B22R, B23R, B24R, B25R, B26R, B27R, B28R, and B29R), and insertions of one, two, or three of the transgene(s) described herein. In some of such embodiments, the recombinant virus genome may be engineered to comprise 10, 11, 12, 13, 14, 15, 16, 17, 18, 19, or 20 of the deletions in the vaccinia virus genes identified herein (e.g., C2L, C1L, N1L, N2L, M1L, M2L, K1L, K2L, K3L, K4L, K5L, K6L, K7R, F1L, F2L, F3L, B8R, B14R, B15R, B16R, B17L, B18R, B19R, and B20R, B21R, B22R, B23R, B24R, B25R, B26R, B27R, B28R, and B29R), and insertions of one, two, or three of the transgene(s) described herein. In certain of such embodiments, the recombinant vaccinia virus genome may be engineered to comprise 21, 22, 23, 24, 25, 26, 27, 28, 29, 30, 31, or 32 of the deletions in the vaccinia virus genes identified herein (e.g., C2L, C1L, N1L, N2L, M1L, M2L, K1L, K2L, K3L, K4L, K5L, K6L, K7R, F1L, F2L, F3L, B8R, B14R, B15R, B16R, B17L, B18R, B19R, and B20R, B21R, B22R, B23R, B24R, B25R, B26R, B27R, B28R, and B29R), and insertions of one, two, or three of the transgene(s) described herein. In some of such embodiments, the recombinant virus genome may be engineered to comprise deletions in C2L, C1L, N1L, N2L, M1L, M2L, K1L, K2L, K3L, K4L, K5L, K6L, K7R, F1L, F2L, F3L, B8R, B14R, B15R, B16R, B17L, B18R, and the following genes in the 3′ inverted terminal repeat (ITR): B19R, and B20R, B21R, B22R, B23R, B24R, B25R, B26R, B27R, B28R, and B29R, and insertions of one, two, or three of the transgene(s) described herein.

[0438] In certain of the embodiments and aspects provided herein, the recombinant vaccinia virus genome comprises a nucleotide sequence identical to the nucleotide sequence of GenBank Accession No. M35027.1 (SEQ ID NO: 590) except that the nucleotide sequence comprises 1, 2, 3, or 4 of the nucleotide polymorphisms identified in Table 46 that are synonymous variants. In some embodiments of the embodiments and aspects provided herein, the recombinant vaccinia virus genome comprises a nucleotide sequence identical to the nucleotide sequence of GenBank Accession No. M35027.1 (SEQ ID NO: 590) except that the nucleotide sequence comprises 1, 2, 3, 4, 5, 6 or 7 of the nucleotide polymorphisms identified in Table 46 that are not in a protein coding region. In certain of the embodiments and aspects provided herein, the recombinant vaccinia virus genome comprises a nucleotide sequence identical to the nucleotide sequence of GenBank Accession No. M35027.1 (SEQ ID NO: 590) except that the nucleotide sequence comprises 1, 2, 3, 4, 5, 6 or 7 of the nucleotide polymorphisms identified in Table 46 that result in change in the amino acid sequence. In some embodiments of the embodiments and aspects provided herein, the recombinant vaccinia virus genome comprises a nucleotide sequence identical to the nucleotide sequence of GenBank Accession No. M35027.1 (SEQ ID NO: 590) except that the nucleotide sequence comprises 1 or 2 of the nucleotide polymorphisms identified in Table 46 that result in a frameshift. In certain of such embodiments, the recombinant vaccinia virus genome may be engineered to comprise 1, 2, 3, 4, 5, 6, 7, 8, 9, or 10 of the deletions in the vaccinia virus genes identified herein (e.g., C2L, C1L, N1L, N2L, M1L, M2L, K1L, K2L, K3L, K4L, K5L, K6L, K7R, F1L, F2L, F3L, B8R, B14R, B15R, B16R, B17L, B18R, B19R, B20R, B21R, B22R, B23R, B24R, B25R, B26R, B27R, B28R, and B29R), and insertions of one, two, or three of the transgene(s) described herein. In some of such embodiments, the recombinant virus genome may be engineered to comprise 10, 11, 12, 13, 14, 15, 16, 17, 18, 19, or 20 of the deletions in the vaccinia virus genes identified herein (e.g., C2L, C1L, N1L, N2L, M1L, M2L, K1L, K2L, K3L, K4L, K5L, K6L, K7R, F1L, F2L, F3L, B8R, B14R, B15R, B16R, B17L, B18R, B19R, and B20R, B21R, B22R, B23R, B24R, B25R, B26R, B27R, B28R, and B29R), and insertions of one, two, or three of the transgene(s) described herein. In certain of such embodiments, the recombinant vaccinia virus genome may be engineered to comprise 21, 22, 23, 24, 25, 26, 27, 28, 29, 30, 31, or 32 of the deletions in the vaccinia virus genes identified herein (e.g., C2L, C1L, N1L, N2L, M1L, M2L, K1L, K2L, K3L, K4L, K5L, K6L, K7R, F1L, F2L, F3L, B8R, B14R, B15R, B16R, B17L, B18R, B19R, and B20R, B21R, B22R, B23R, B24R, B25R, B26R, B27R, B28R, and B29R), and insertions of one, two, or three of the transgene(s) described herein. In some of such embodiments, the recombinant virus genome may be engineered to comprise deletions in C2L, C1L, N1L, N2L, M1L, M2L, K1L, K2L, K3L, K4L, K5L, K6L, K7R, F1L, F2L, F3L, B8R, B14R, B15R, B16R, B17L, B18R, and the following genes in the 3′ inverted terminal repeat (ITR): B19R, and B20R, B21R, B22R, B23R, B24R, B25R, B26R, B27R, B28R, and B29R, and insertions of one, two, or three of the transgene(s) described herein.

[0439] In certain of the embodiments and aspects provided herein, the recombinant vaccinia virus genome comprises a nucleotide sequence identical to the nucleotide sequence of GenBank Accession No. M35027.1 (SEQ ID NO: 590) except that the nucleotide sequence comprises the nucleotide polymorphisms found in 1, 2, 3, 4, 5, 6 or 7 of the genes identified in Table 46. In some of the embodiments and aspects provided herein, the recombinant vaccinia virus genome comprises a nucleotide sequence identical to the nucleotide sequence of GenBank Accession No. M35027.1 (SEQ ID NO: 590) except that the nucleotide sequence comprises of the nucleotide polymorphisms found in 8, 9, 10, 11, 12, 12 or 13 of the genes identified in Table 46. In certain of the embodiments and aspects provided herein, the recombinant vaccinia virus genome comprises a nucleotide sequence identical to the nucleotide sequence of GenBank Accession No. M35027.1 (SEQ ID NO: 590) except that the nucleotide sequence comprises the nucleotide polymorphisms nucleotide polymorphisms found in all of the genes identified in Table 46. In certain of the embodiments and aspects provided herein, the recombinant vaccinia virus genome comprises a nucleotide sequence identical to the nucleotide sequence of GenBank Accession No. M35027.1 (SEQ ID NO: 590) except that the nucleotide sequence comprises the nucleotide polymorphisms found in 1-5, 5-10, 1-13, 5-13, or 10-13 of the genes identified in Table 46. In certain of such embodiments, the recombinant vaccinia virus genome may be engineered to comprise 1, 2, 3, 4, 5, 6, 7, 8, 9, or 10 of the deletions in the vaccinia virus genes identified herein (e.g., C2L, C1L, N1L, N2L, M1L, M2L, K1L, K2L, K3L, K4L, K5L, K6L, K7R, F1L, F2L, F3L, B8R, B14R, B15R, B16R, B17L, B18R, B19R, B20R, B21R, B22R, B23R, B24R, B25R, B26R, B27R, B28R, and B29R), and insertions of one, two, or three of the transgene(s) described herein. In some of such embodiments, the recombinant virus genome may be engineered to comprise 10, 11, 12, 13, 14, 15, 16, 17, 18, 19, or 20 of the deletions in the vaccinia virus genes identified herein (e.g., C2L, C1L, N1L, N2L, M1L, M2L, K1L, K2L, K3L, K4L, K5L, K6L, K7R, F1L, F2L, F3L, B8R, B14R, B15R, B16R, B17L, B18R, B19R, and B20R, B21R, B22R, B23R, B24R, B25R, B26R, B27R, B28R, and B29R), and insertions of one, two, or three of the transgene(s) described herein. In certain of such embodiments, the recombinant vaccinia virus genome may be engineered to comprise 21, 22, 23, 24, 25, 26, 27, 28, 29, 30, 31, or 32 of the deletions in the vaccinia virus genes identified herein (e.g., C2L, C1L, N1L, N2L, M1L, M2L, K1L, K2L, K3L, K4L, K5L, K6L, K7R, F1L, F2L, F3L, B8R, B14R, B15R, B16R, B17L, B18R, B19R, and B20R, B21R, B22R, B23R, B24R, B25R, B26R, B27R, B28R, and B29R), and insertions of one, two, or three of the transgene(s) described herein. In some of such embodiments, the recombinant virus genome may be engineered to comprise deletions in C2L, C1L, N1L, N2L, M1L, M2L, K1L, K2L, K3L, K4L, K5L, K6L, K7R, F1L, F2L, F3L, B8R, B14R, B15R, B16R, B17L, B18R, and the following genes in the 3′ inverted terminal repeat (ITR): B19R, and B20R, B21R, B22R, B23R, B24R, B25R, B26R, B27R, B28R, and B29R, and insertions of one, two, or three of the transgene(s) described herein.

[0440] In certain of the embodiments and aspects provided herein, the recombinant vaccinia virus genome comprises a nucleotide sequence identical to the nucleotide sequence of GenBank Accession No. M35027.1 (SEQ ID NO: 590) except that the nucleotide sequence comprises the nucleotide polymorphism(s) identified in Table 46 for vaccinia gene C14L, C2L, C1L, N2L, F3L, F13L, F16L, G7L, L3L, J3R, D6R, A41L, or A46R. In some of the embodiments and aspects provided herein, the recombinant vaccinia virus genome comprises a nucleotide sequence identical to the nucleotide sequence of GenBank Accession No. M35027.1 (SEQ ID NO: 590) except that the nucleotide sequence comprises of the nucleotide polymorphisms identified in Table 46 for vaccinia gene C14L, C2L, C1L, N2L, F3L, F13L, F16L, G7L, L3L, J3R, D6R, A41L, and A46R. In certain of the embodiments and aspects provided herein, the recombinant vaccinia virus genome comprises a nucleotide sequence identical to the nucleotide sequence of GenBank Accession No. M35027.1 (SEQ ID NO: 590),except that the nucleotide sequence comprises the nucleotide polymorphisms identified in Table 46 for 1, 2, 3, 4, 5, 6, or 7 of the following vaccinia genes: C14L, C2L, C1L, N2L, F3L, F13L, F16L, G7L, L3L, J3R, D6R, A41L, and A46R. In certain of the embodiments and aspects provided herein, the recombinant vaccinia virus genome comprises a nucleotide sequence identical to the nucleotide sequence of GenBank Accession No. M35027.1 (SEQ ID NO: 590) except that the nucleotide sequence comprises the nucleotide polymorphisms identified in Table 46 for 8, 9, 10, 11, 12, or 13 of the following vaccinia genes: C14L, C2L, C1L, N2L, F3L, F13L, F16L, G7L, L3L, J3R, D6R, A41L, and A46R. In certain of such embodiments, the recombinant vaccinia virus genome may be engineered to comprise 1, 2, 3, 4, 5, 6, 7, 8, 9, or 10 of the deletions in the vaccinia virus genes identified herein (e.g., C2L, C1L, N1L, N2L, M1L, M2L, K1L, K2L, K3L, K4L, K5 L, K6L, K7R, F1L, F2L, F3L, B8R, B14R, B15R, B16R, B17L, B18R, B19R, B20R, B21R, B22R, B23R, B24R, B25R, B26R, B27R, B28R, and B29R), and insertions of one, two, or three of the transgene(s) described herein. In some of such embodiments, the recombinant virus genome may be engineered to comprise 10, 11, 12, 13, 14, 15, 16, 17, 18, 19, or 20 of the deletions in the vaccinia virus genes identified herein (e.g., C2L, C1L, N1L, N2L, M1L, M2L, K1L, K2L, K3L, K4L, K5L, K6L, K7R, F1L, F2L, F3L, B8R, B14R, B15R, B16R, B17L, B18R, B19R, and B20R, B21R, B22R, B23R, B24R, B25R, B26R, B27R, B28R, and B29R), and insertions of one, two, or three of the transgene(s) described herein. In certain of such embodiments, the recombinant vaccinia virus genome may be engineered to comprise 21, 22, 23, 24, 25, 26, 27, 28, 29, 30, 31, or 32 of the deletions in the vaccinia virus genes identified herein (e.g., C2L, C1L, N1L, N2L, M1L, M2L, K1L, K2L, K3L, K4L, K5 L, K6L, K7R, F1L, F2L, F3L, B8R, B14R, B15R, B16R, B17L, B18R, B19R, and B20R, B21R, B22R, B23R, B24R, B25R, B26R, B27R, B28R, and B29R), and insertions of one, two, or three of the transgene(s) described herein. In some of such embodiments, the recombinant virus genome may be engineered to comprise deletions in C2L, C1L, N1L, N2L, M1L, M2L, K1L, K2L, K3L, K4L, K5L, K6L, K7R, F1L, F2L, F3L, B8R, B14R, B15R, B16R, B17L, B18R, and the following genes in the 3′ inverted terminal repeat (ITR): B19R, and B20R, B21R, B22R, B23R, B24R, B25R, B26R, B27R, B28R, and B29R, and insertions of one, two, or three of the transgene(s) described herein.

[0441] In certain embodiments of the various embodiments and aspects described herein, the recombinant vaccinia virus genome comprises the nucleotide sequence of SEQ ID NO: 210. In certain embodiments of the various embodiments and aspects described herein, the recombinant vaccinia virus genome comprises a nucleotide sequence that is identical to the nucleotide sequence of SEQ ID NO: 210 except for 1, 2, 3, 4, 5, 7, 8, 9, 10, 11, 12, 13, 14, 15, 16, 17, 18, 19, or 20 of the nucleotide polymorphisms identified in Table 46.

[0442] In certain embodiments, provided herein is a nucleic acid comprising a recombinant vaccinia virus genome, comprising: (a) a vaccinia virus nucleotide sequence of SEQ ID NO: 210; and (b) one, two, or three of the following: (i) a first transgene comprising a first nucleotide sequence encoding an antibody or antigen-binding fragment thereof that specifically binds to CTLA-4 (e.g., human CTLA-4) (for example, wherein the first nucleotide sequence comprises the nucleotide sequence set forth in SEQ ID NO: 214); (ii) a second transgene comprising a second nucleotide sequence encoding an IL-12 polypeptide (for example, wherein the second nucleotide sequence comprises the nucleotide sequence set forth in SEQ ID NO: 215); and (iii) a third transgene comprising a third nucleotide sequence encoding FLT3L (for example, wherein the third nucleotide sequence comprises the nucleotide sequence set forth in SEQ ID NO: 216).

[0443] In certain embodiments, provided herein is a nucleic acid comprising a recombinant vaccinia virus genome, comprising: (a) a vaccinia virus nucleotide sequence of SEQ ID NO: 210; and (b) two or three of the following: (i) a first transgene comprising a first nucleotide sequence encoding an antibody or antigen-binding fragment thereof that specifically binds to CTLA-4 (e.g., human CTLA-4) (for example, wherein the first nucleotide sequence comprises the nucleotide sequence set forth in SEQ ID NO: 214); (ii) a second transgene comprising a second nucleotide sequence encoding an IL-12 polypeptide (for example, wherein the second nucleotide sequence comprises the nucleotide sequence set forth in SEQ ID NO: 215); and (iii) a third transgene comprising a third nucleotide sequence encoding FLT3L (for example, wherein the third nucleotide sequence comprises the nucleotide sequence set forth in SEQ ID NO: 216).

[0444] In certain embodiments, provided herein is a nucleic acid comprising a recombinant vaccinia virus genome, comprising: (a) a vaccinia virus nucleotide sequence of SEQ ID NO: 210; and (b): (i) a first transgene comprising a first nucleotide sequence encoding an antibody or antigen-binding fragment thereof that specifically binds to CTLA-4 (e.g., human CTLA-4) (for example, wherein the first nucleotide sequence comprises the nucleotide sequence set forth in SEQ ID NO: 214); (ii) a second transgene comprising a second nucleotide sequence encoding an IL-12 polypeptide (for example, wherein the second nucleotide sequence comprises the nucleotide sequence set forth in SEQ ID NO: 215); and (iii) a third transgene comprising a third nucleotide sequence encoding FLT3L (for example, wherein the third nucleotide sequence comprises the nucleotide sequence set forth in SEQ ID NO: 216)

[0445] In specific embodiments of the above wherein the nucleic acid comprises the first transgene, the nucleic acid further comprises a nucleotide sequence comprising an H5R promoter operably linked to the first nucleotide sequence encoding the anti-CTLA-4 antibody. In specific embodiments of the above wherein the nucleic acid comprises the second transgene, the nucleic acid further comprises a nucleotide sequence comprising a late promoter operably linked to the second nucleotide sequence encoding the IL-12 polypeptide, wherein the late promoter comprises the nucleotide sequence of SEQ ID NO: 561. In specific embodiments of the above wherein the nucleic acid comprises the third transgene, the nucleic acid further comprises a nucleotide sequence comprising a B8R promoter operably linked to the third nucleotide sequence encoding FLT3L. In specific embodiments of the above wherein the nucleic acid comprises the third transgene, the nucleic acid further comprises a nucleotide sequence comprising a B19R promoter operably linked to the third nucleotide sequence encoding FLT3L. In specific embodiments of the above wherein the nucleic acid comprises the third transgene, the nucleic acid further comprises a nucleotide sequence comprising a B8R promoter and a B19R promoter operably linked to the third nucleotide sequence encoding FLT3L. In specific embodiments of the above, the endogenous vaccinia virus genes that flank the first nucleotide sequence have the same orientation, and the first nucleotide sequence is in the same orientation as the endogenous vaccinia virus genes that flank the first nucleotide sequence. In specific embodiments of the above, the endogenous vaccinia virus genes that flank the second nucleotide sequence have the same orientation, and the second nucleotide sequence is in the same orientation as the endogenous vaccinia virus genes that flank the second nucleotide sequence. In specific embodiments of the above, the endogenous vaccinia virus genes that flank the third nucleotide sequence have the same orientation, and the third nucleotide sequence is in the same orientation as the endogenous vaccinia virus genes that flank the third nucleotide sequence. In a specific embodiment of the above, the nucleic acid comprises the first transgene, the second transgene, and the third transgene, and the first transgene is inserted between the partial C2L and F3L vaccinia genes, and the second transgene and the third transgene are inserted into the locus of the deletion in the B8R gene. In a particular embodiment, the B8R promoter comprises the nucleotide sequence of SEQ ID NO: 564. In a particular embodiment, the B19R promoter comprises the nucleotide sequence of SEQ ID NO: 565.

[0446] In certain embodiments of the various embodiments and aspects described herein, the recombinant vaccinia virus genome comprises the nucleotide sequence of SEQ ID NO: 624. In certain embodiments of the various embodiments and aspects described herein, the recombinant vaccinia virus genome comprises a nucleotide sequence that is identical to the nucleotide sequence of SEQ ID NO: 624 except for 1, 2, 3, 4, 5, 7, 8, 9, 10, 11, 12, 13, 14, 15, 16, 17, 18, 19, or 20 of the nucleotide polymorphisms identified in Table 46.

[0447] In certain embodiments, provided herein is a nucleic acid comprising a recombinant vaccinia virus genome, comprising: (a) a vaccinia virus nucleotide sequence of SEQ ID NO: 624; and (b) one, two, or three of the following: (i) a first transgene comprising a first nucleotide sequence encoding an antibody or antigen-binding fragment thereof that specifically binds to CTLA-4 (e.g., human CTLA-4) (for example, wherein the first nucleotide sequence comprises the nucleotide sequence set forth in SEQ ID NO: 214); (ii) a second transgene comprising a second nucleotide sequence encoding an IL-12 polypeptide (for example, wherein the second nucleotide sequence comprises the nucleotide sequence set forth in SEQ ID NO: 215); and (iii) a third transgene comprising a third nucleotide sequence encoding FLT3L (for example, wherein the third nucleotide sequence comprises the nucleotide sequence set forth in SEQ ID NO: 216). In specific embodiments, the nucleic acid further comprises a promoter, such as described herein, operably linked to the first nucleotide sequence, a promoter, such as described herein, operably linked to the second nucleotide sequence, or a promoter, such as described herein, operably linked to the third promoter. In specific embodiments, the nucleic acid further comprises a promoter, such as described herein, operably linked to the first nucleotide sequence, a promoter, such as described herein, operably linked to the second nucleotide sequence, and a promoter, such as described herein, operably linked to the third promoter. In specific embodiments, the first transgene, second transgene and/or third transgene are inserted into a locus or loci described herein.

[0448] In certain embodiments, provided herein is a nucleic acid comprising a recombinant vaccinia virus genome, comprising: (a) a vaccinia virus nucleotide sequence of SEQ ID NO: 624; and (b) two or three of the following: (i) a first transgene comprising a first nucleotide sequence encoding an antibody or antigen-binding fragment thereof that specifically binds to CTLA-4 (e.g., human CTLA-4) (for example, wherein the first nucleotide sequence comprises the nucleotide sequence set forth in SEQ ID NO: 214); (ii) a second transgene comprising a second nucleotide sequence encoding an IL-12 polypeptide (for example, wherein the second nucleotide sequence comprises the nucleotide sequence set forth in SEQ ID NO: 215); and (iii) a third transgene comprising a third nucleotide sequence encoding FLT3L (for example, wherein the third nucleotide sequence comprises the nucleotide sequence set forth in SEQ ID NO: 216). In specific embodiments, the nucleic acid further comprises a promoter, such as described herein, operably linked to the first nucleotide sequence, a promoter, such as described herein, operably linked to the second nucleotide sequence, or a promoter, such as described herein, operably linked to the third promoter. In specific embodiments, the two or three transgenes are inserted into a locus or loci described herein.

[0449] In certain embodiments, provided herein is a nucleic acid comprising a recombinant vaccinia virus genome, comprising: (a) a vaccinia virus nucleotide sequence of SEQ ID NO: 624; and (b): (i) a first transgene comprising a first nucleotide sequence encoding an antibody or antigen-binding fragment thereof that specifically binds to CTLA-4 (e.g., human CTLA-4) (for example, wherein the first nucleotide sequence comprises the nucleotide sequence set forth in SEQ ID NO: 214); (ii) a second transgene comprising a second nucleotide sequence encoding an IL-12 polypeptide (for example, wherein the second nucleotide sequence comprises the nucleotide sequence set forth in SEQ ID NO: 215); and (iii) a third transgene comprising a third nucleotide sequence encoding FLT3L (for example, wherein the third nucleotide sequence comprises the nucleotide sequence set forth in SEQ ID NO: 216). In specific embodiments, the nucleic acid further comprises a promoter, such as described herein, operably linked to the first nucleotide sequence, a promoter, such as described herein, operably linked to the second nucleotide sequence, or a promoter, such as described herein, operably linked to the third promoter. In specific embodiments, the nucleic acid further comprises a promoter, such as described herein, operably linked to the first nucleotide sequence, a promoter, such as described herein, operably linked to the second nucleotide sequence, and a promoter, such as described herein, operably linked to the third promoter. In specific embodiments, the first transgene, second transgene and third transgene are inserted into a locus or loci described herein.

[0450] In specific embodiments of the above wherein the nucleic acid comprises the first transgene, the nucleic acid further comprises a nucleotide sequence comprising an H5R promoter operably linked to the first nucleotide sequence encoding the anti-CTLA-4 antibody. In specific embodiments of the above wherein the nucleic acid comprises the second transgene, the nucleic acid further comprises a nucleotide sequence comprising a late promoter operably linked to the second nucleotide sequence encoding the IL-12 polypeptide, wherein the late promoter comprises the nucleotide sequence of SEQ ID NO: 561. In specific embodiments of the above wherein the nucleic acid comprises the third transgene, the nucleic acid further comprises a nucleotide sequence comprising a B8R promoter operably linked to the third nucleotide sequence encoding FLT3L. In specific embodiments of the above wherein the nucleic acid comprises the third transgene, the nucleic acid further comprises a nucleotide sequence comprising a B19R promoter operably linked to the third nucleotide sequence encoding FLT3L. In specific embodiments of the above wherein the nucleic acid comprises the third transgene, the nucleic acid further comprises a nucleotide sequence comprising a B8R promoter and a B19R promoter operably linked to the third nucleotide sequence encoding FLT3L. In specific embodiments of the above, the endogenous vaccinia virus genes that flank the first nucleotide sequence have the same orientation, and the first nucleotide sequence is in the same orientation as the endogenous vaccinia virus genes that flank the first nucleotide sequence. In specific embodiments of the above, the endogenous vaccinia virus genes that flank the second nucleotide sequence have the same orientation, and the second nucleotide sequence is in the same orientation as the endogenous vaccinia virus genes that flank the second nucleotide sequence. In specific embodiments of the above, the endogenous vaccinia virus genes that flank the third nucleotide sequence have the same orientation, and the third nucleotide sequence is in the same orientation as the endogenous vaccinia virus genes that flank the third nucleotide sequence. In specific embodiments, the nucleic acid further comprises a deletion in the B8R gene. In a specific embodiment of the above, the nucleic acid comprises the first transgene, the second transgene, and the third transgene, and further comprises a deletion in the B8R gene, and the first transgene is inserted between the partial C2L and F3L vaccinia genes, and the second transgene and the third transgene are inserted into the locus of the deletion in the B8R gene. In a particular embodiment, the B8R promoter comprises the nucleotide sequence of SEQ ID NO: 564. In a particular embodiment, the B19R promoter comprises the nucleotide sequence of SEQ ID NO: 565.

[0451] In another aspect, provided herein is a nucleic acid comprising a recombinant vaccinia virus genome, comprising: (a) deletions in the following genes: C2L, C1L, N1L, N2L, M1L, M2L, K1L, K2L, K3L, K4L, K5L, K6L, K7R, F1L, F2L, F3L, B14R, B15R, B16R, B17L, B18R, B19R, and B20R, and optionally a deletion in the B8R gene; (b) deletions in the following genes in the 3′ ITR: B21R, B22R, B23R, B24R, B25R, B26R, B27R, B28R, and B29R; (c) a first transgene comprising a first nucleotide sequence encoding an antibody or antigen-binding fragment thereof that specifically binds to CTLA-4 (e.g., human CTLA-4); (d) a second transgene comprising a second nucleotide sequence encoding an IL-12 polypeptide; and (e) a third transgene comprising a third nucleotide sequence encoding FLT3L; wherein the deletions in the C2L, F3L, B14R, and B29R vaccinia genes are partial deletions; and wherein the nucleic acid further comprises: (i) a nucleotide sequence comprising at least one promoter operably linked to the first nucleotide sequence, wherein the at least one promoter operably linked to the first nucleotide sequence is an H5R promoter; (ii) a nucleotide sequence comprising at least one promoter operably linked to the second nucleotide sequence, wherein the at least one promoter operably linked to the second nucleotide sequence is a late promoter that comprises the nucleotide sequence of SEQ ID NO: 561; and (iii) a nucleotide sequence comprising at least one promoter operably linked to the third nucleotide sequence, wherein the at least one promoter operably linked to the third nucleotide sequence is a B8R promoter and a B19R promoter. In specific embodiments, the first nucleotide sequence is in the same orientation as endogenous vaccinia virus genes that flank the first nucleotide sequence, the second nucleotide sequence is in the same orientation as endogenous vaccinia virus genes that flank the second nucleotide sequence, and the third nucleotide sequence is in the same orientation as endogenous vaccinia virus genes that flank the third nucleotide sequence. In specific embodiments, the first transgene is inserted between the partial C2L and F3L vaccinia genes, and the second transgene and the third transgene are inserted into the locus of the deletion in the B8R gene. In specific embodiments, the first transgene is inserted between the partial B14R and B29R vaccinia genes, and the second transgene and the third transgene are inserted into the locus of the deletion in the B8R gene. In specific embodiments, the third transgene is upstream of the second transgene. In specific embodiments, the third transgene is downstream of the second transgene. In a particular embodiment, the nucleic acid comprises a recombinant vaccinia virus genome that comprises a deletion in the B8R gene. In a particular embodiment, the B8R promoter comprises the nucleotide sequence of SEQ ID NO: 564. In a particular embodiment, the B19R promoter comprises the nucleotide sequence of SEQ ID NO: 565.

[0452] In another aspect, provided herein is a nucleic acid comprising a recombinant vaccinia virus genome, comprising: (a) deletions in the following genes: C2L, C1L, N1L, N2L, M1L, M2L, K1L, K2L, K3L, K4L, K5L, K6L, K7R, F1L, F2L, F3L, B14R, B15R, B16R, B17L, B18R, B19R, and B20R, and optionally a deletion in the B8R gene; (b) deletions in the following genes in the 3′ ITR: B21R, B22R, B23R, B24R, B25R, B26R, B27R, B28R, and B29R; (c) a first transgene comprising a first nucleotide sequence encoding an antibody or antigen-binding fragment thereof that specifically binds to CTLA-4 (e.g., human CTLA-4), wherein the first nucleotide sequence is in the same orientation as endogenous vaccinia virus genes that flank the first nucleotide sequence, and wherein the first transgene is inserted between the partial C2L and F3L vaccinia genes; (d) a second transgene comprising a second nucleotide sequence encoding an IL-12 polypeptide, wherein the second nucleotide sequence is in the same orientation as endogenous vaccinia virus genes that flank the second nucleotide sequence, and wherein the second transgene is inserted into the locus of the deletion in the B8R gene; and (e) a third transgene comprising a third nucleotide sequence encoding FLT3L, wherein the third nucleotide sequence is in the same orientation as endogenous vaccinia virus genes that flank the third nucleotide sequence, wherein the third transgene is inserted into the locus of the deletion in the B8R gene, and wherein the third transgene is upstream of the second transgene; wherein the deletions in the C2L, F3L, B14R, and B29R vaccinia genes are partial deletions; and wherein the nucleic acid further comprises: (i) a nucleotide sequence comprising at least one promoter operably linked to the first nucleotide sequence, wherein the at least one promoter operably linked to the first nucleotide sequence is an H5R promoter; (ii) a nucleotide sequence comprising at least one promoter operably linked to the second nucleotide sequence, wherein the at least one promoter operably linked to the second nucleotide sequence is a late promoter that comprises the nucleotide sequence of SEQ ID NO: 561; and (iii) a nucleotide sequence comprising at least one promoter operably linked to the third nucleotide sequence, wherein the at least one promoter operably linked to the third nucleotide sequence is a B8R promoter and a B19R promoter. In a particular embodiment, the nucleic acid comprises a recombinant vaccinia virus genome that comprises a deletion in the B8R gene. In a particular embodiment, the B8R promoter comprises the nucleotide sequence of SEQ ID NO: 564. In a particular embodiment, the B19R promoter comprises the nucleotide sequence of SEQ ID NO: 565.

[0453] In another aspect, provided herein is a nucleic acid comprising a recombinant vaccinia virus genome, comprising: (a) deletions in the following genes: C2L, C1L, N1L, N2L, M1L, M2L, K1L, K2L, K3L, K4L, K5L, K6L, K7R, F1L, F2L, F3L, B14R, B15R, B16R, B17L, B18R, B19R, and B20R, and optionally a deletion in the B8R gene; (b) deletions in the following genes in the 3′ ITR: B21R, B22R, B23R, B24R, B25R, B26R, B27R, B28R, and B29R; (c) a first transgene comprising a first nucleotide sequence encoding an antibody or antigen-binding fragment thereof that specifically binds to CTLA-4 (e.g., human CTLA-4), wherein the first nucleotide sequence is in the same orientation as endogenous vaccinia virus genes that flank the first nucleotide sequence, and wherein the first transgene is inserted between the partial C2L and F3L vaccinia genes; (d) a second transgene comprising a second nucleotide sequence encoding an IL-12 polypeptide, wherein the second nucleotide sequence is in the same orientation as endogenous vaccinia virus genes that flank the second nucleotide sequence, and wherein the second transgene is inserted into the locus of the deletion in the B8R gene; and (e) a third transgene comprising a third nucleotide sequence encoding FLT3L; wherein the deletions in the C2L, F3L, B14R, and B29R vaccinia genes are partial deletions, wherein the third nucleotide sequence is in the same orientation as endogenous vaccinia virus genes that flank the third nucleotide sequence, wherein the third transgene is inserted into the locus of the deletion in the B8R gene, and wherein the third transgene is downstream of the second transgene; and wherein the nucleic acid further comprises: (i) a nucleotide sequence comprising at least one promoter operably linked to the first nucleotide sequence, wherein the at least one promoter operably linked to the first nucleotide sequence is an H5R promoter; (ii) a nucleotide sequence comprising at least one promoter operably linked to the second nucleotide sequence, wherein the at least one promoter operably linked to the second nucleotide sequence is a late promoter that comprises the nucleotide sequence of SEQ ID NO: 561; and (iii) a nucleotide sequence comprising at least one promoter operably linked to the third nucleotide sequence, wherein the at least one promoter operably linked to the third nucleotide sequence is a B8R promoter and a B19R promoter. In a particular embodiment, the nucleic acid comprises a recombinant vaccinia virus genome that comprises a deletion in the B8R gene. In a particular embodiment, the B8R promoter comprises the nucleotide sequence of SEQ ID NO: 564. In a particular embodiment, the B19R promoter comprises the nucleotide sequence of SEQ ID NO: 565

[0454] In another aspect, provided herein is a nucleic acid comprising a recombinant vaccinia virus genome, comprising: (a) deletions in the following genes: C2L, C1L, N1L, N2L, M1L, M2L, K1L, K2L, K3L, K4L, K5L, K6L, K7R, F1L, F2L, F3L, B14R, B15R, B16R, B17L, B18R, B19R, and B20R, and optionally a deletion in the B8R gene; (b) deletions in the following genes in the 3′ ITR: B21R, B22R, B23R, B24R, B25R, B26R, B27R, B28R, and B29R; (c) a first transgene comprising a first nucleotide sequence encoding an antibody or antigen-binding fragment thereof that specifically binds to CTLA-4 (e.g., human CTLA-4), wherein the first nucleotide sequence is in the same orientation as endogenous vaccinia virus genes that flank the first nucleotide sequence, and wherein the first transgene is inserted between the partial B14R and B29R vaccinia genes; (d) a second transgene comprising a second nucleotide sequence encoding an IL-12 polypeptide, wherein the second nucleotide sequence is in the same orientation as endogenous vaccinia virus genes that flank the second nucleotide sequence, and wherein the second transgene is inserted into the locus of the deletion in the B8R gene; and (e) a third transgene comprising a third nucleotide sequence encoding FLT3L; wherein the deletions in the C2L, F3L, B14R, and B29R vaccinia genes are partial deletions, wherein the third nucleotide sequence is in the same orientation as endogenous vaccinia virus genes that flank the third nucleotide sequence, wherein the third transgene is inserted into the locus of the deletion in the B8R gene, and wherein the third transgene is upstream of the second transgene; and wherein the nucleic acid further comprises: (i) a nucleotide sequence comprising at least one promoter operably linked to the first nucleotide sequence, wherein the at least one promoter operably linked to the first nucleotide sequence is an H5R promoter; (ii) a nucleotide sequence comprising at least one promoter operably linked to the second nucleotide sequence, wherein the at least one promoter operably linked to the second nucleotide sequence is a late promoter that comprises the nucleotide sequence of SEQ ID NO: 561; and (iii) a nucleotide sequence comprising at least one promoter operably linked to the third nucleotide sequence, wherein the at least one promoter operably linked to the third nucleotide sequence is a B8R promoter and a B19R promoter. In a particular embodiment, the nucleic acid comprises a recombinant vaccinia virus genome that comprises a deletion in the B8R gene. In a particular embodiment, the B8R promoter comprises the nucleotide sequence of SEQ ID NO: 564. In a particular embodiment, the B19R promoter comprises the nucleotide sequence of SEQ ID NO: 565.

[0455] In another aspect, provided herein is a nucleic acid comprising a recombinant vaccinia virus genome, comprising: (a) deletions in the following genes: C2L, C1L, N1L, N2L, M1L, M2L, K1L, K2L, K3L, K4L, K5L, K6L, K7R, F1L, F2L, F3L, B14R, B15R, B16R, B17L, B18R, B19R, and B20R, and optionally a deletion in the B8R gene; (b) deletions in the following genes in the 3′ ITR: B21R, B22R, B23R, B24R, B25R, B26R, B27R, B28R, and B29R; (c) a first transgene comprising a first nucleotide sequence encoding an antibody or antigen-binding fragment thereof that specifically binds to CTLA-4 (e.g., human CTLA-4), wherein the first nucleotide sequence is in the same orientation as endogenous vaccinia virus genes that flank the first nucleotide sequence, and wherein the first transgene is inserted between the partial B14R and B29R vaccinia genes; (d) a second transgene comprising a second nucleotide sequence encoding an IL-12 polypeptide, wherein the second nucleotide sequence is in the same orientation as endogenous vaccinia virus genes that flank the second nucleotide sequence, and wherein the second transgene is inserted into the locus of the deletion in the B8R gene; and (e) a third transgene comprising a third nucleotide sequence encoding FLT3L; wherein the deletions in the C2L, F3L, B14R, and B29R vaccinia genes are partial deletions, wherein the third nucleotide sequence is in the same orientation as endogenous vaccinia virus genes that flank the third nucleotide sequence, wherein the third transgene is inserted into the locus of the deletion in the B8R gene, and wherein the third transgene is downstream of the second transgene; and wherein the nucleic acid further comprises: (i) a nucleotide sequence comprising at least one promoter operably linked to the first nucleotide sequence, wherein the at least one promoter operably linked to the first nucleotide sequence is an H5R promoter; (ii) a nucleotide sequence comprising at least one promoter operably linked to the second nucleotide sequence, wherein the at least one promoter operably linked to the second nucleotide sequence is a late promoter that comprises the nucleotide sequence of SEQ ID NO: 561; and (iii) a nucleotide sequence comprising at least one promoter operably linked to the third nucleotide sequence, wherein the at least one promoter operably linked to the third nucleotide sequence is a B8R promoter and a B19R promoter. In a particular embodiment, the nucleic acid comprises a recombinant vaccinia virus genome that comprises a deletion in the B8R gene. In a particular embodiment, the B8R promoter comprises the nucleotide sequence of SEQ ID NO: 564. In a particular embodiment, the B19R promoter comprises the nucleotide sequence of SEQ ID NO: 565.

[0456] In another aspect, provided herein is a nucleic acid comprising a recombinant vaccinia virus genome, comprising: (a) a vaccinia virus nucleotide sequence of SEQ ID NO: 210, which comprises partial C2L, F3L, B14R, and B29R vaccinia genes and which comprises a deletion in the B8R gene; (b) a first transgene comprising a first nucleotide sequence encoding an antibody that specifically binds to Cytotoxic T-lymphocyte Associated Protein 4 (CTLA-4), wherein the first nucleotide sequence is set forth in SEQ ID NO: 214; (c) a second transgene comprising a second nucleotide sequence encoding an Interleukin 12 (IL-12) polypeptide, wherein the second nucleotide sequence is set forth in SEQ ID NO: 215; and (d) a third transgene comprising a third nucleotide sequence encoding FMS-like tyrosine kinase 3 ligand (FLT3L), wherein the third nucleotide sequence is set forth in SEQ ID NO: 216.

[0457] In some embodiments, when the flanking endogenous vaccinia virus genes of the first nucleotide sequence have the same orientation, the first nucleotide sequence is in the same orientation as the flanking endogenous vaccinia virus genes. In other embodiments, when the flanking endogenous vaccinia virus genes of the first nucleotide sequence have the same orientation, the first nucleotide sequence is in the reverse orientation relative to the flanking endogenous vaccinia virus genes. In other embodiments, when the flanking endogenous vaccinia virus genes of the first nucleotide sequence have opposite orientations, the first nucleotide sequence is in the same orientation as the flanking endogenous vaccinia virus gene that is closer to the 5′ end of the recombinant vaccinia virus genome. In other embodiments, when the flanking endogenous vaccinia virus genes of the first nucleotide sequence have opposite orientations, the first nucleotide sequence is in the same orientation as the flanking endogenous vaccinia virus gene that is closer to the 3′ end of the recombinant vaccinia virus genome. In a specific embodiment, the flanking endogenous vaccinia virus genes of the first nucleotide sequence are the C2L and F3L genes. In another specific embodiment, the flanking endogenous vaccinia virus genes of the first nucleotide sequence are the C3L and F4L genes. In another specific embodiment, the flanking endogenous vaccinia virus genes of the first nucleotide sequence are the B14R and B29R genes. In another specific embodiment, the flanking endogenous vaccinia virus genes of the first nucleotide sequence are the B13R and B29R genes. In yet another embodiment, the first nucleotide sequence is in the same orientation as an endogenous vaccinia gene adjacent to the first nucleotide sequence. In a specific embodiment, the endogenous vaccinia gene adjacent to the first nucleotide sequence is the B13R gene. In some embodiments, when the flanking endogenous vaccinia virus genes of the second nucleotide sequence have the same orientation, the second nucleotide sequence is in the same orientation as the flanking endogenous vaccinia virus genes. In other embodiments, when the flanking endogenous vaccinia virus genes of the second nucleotide sequence have the same orientation, the second nucleotide sequence is in the reverse orientation relative to the flanking endogenous vaccinia virus genes. In other embodiments, when the flanking endogenous vaccinia virus genes of the second nucleotide sequence have opposite orientations, the second nucleotide sequence is in the same orientation as the flanking endogenous vaccinia virus gene that is closer to the 5′ end of the recombinant vaccinia virus genome. In other embodiments, when the flanking endogenous vaccinia virus genes of the second nucleotide sequence have opposite orientations, the second nucleotide sequence is in the same orientation as the flanking endogenous vaccinia virus gene that is closer to the 3′ end of the recombinant vaccinia virus genome. In a specific embodiment, the flanking endogenous vaccinia virus genes of the second nucleotide sequence are the C2L and F3L genes. In another specific embodiment, the flanking endogenous vaccinia virus genes of the second nucleotide sequence are the C3L and F4L genes. In another specific embodiment, the flanking endogenous vaccinia virus genes of the second nucleotide sequence are the B14R and B29R genes. In another specific embodiment, the flanking endogenous vaccinia virus genes of the second nucleotide sequence are the B13R and B29R genes. In yet another embodiment, the second nucleotide sequence is in the same orientation as an endogenous vaccinia gene adjacent to the second nucleotide sequence. In a specific embodiment, the endogenous vaccinia gene adjacent to the second nucleotide sequence is the B13R gene. In some embodiments, when the flanking endogenous vaccinia virus genes of the third nucleotide sequence have the same orientation, the third nucleotide sequence is in the same orientation as the flanking endogenous vaccinia virus genes. In other embodiments, when the flanking endogenous vaccinia virus genes of the third nucleotide sequence have the same orientation, the third nucleotide sequence is in the reverse orientation relative to the flanking endogenous vaccinia virus genes. In other embodiments, when the flanking endogenous vaccinia virus genes of the third nucleotide sequence have opposite orientations, the third nucleotide sequence is in the same orientation as the flanking endogenous vaccinia virus gene that is closer to the 5′ end of the recombinant vaccinia virus genome. In other embodiments, when the flanking endogenous vaccinia virus genes of the third nucleotide sequence have opposite orientations, the third nucleotide sequence is in the same orientation as the flanking endogenous vaccinia virus gene that is closer to the 3′ end of the recombinant vaccinia virus genome. In a specific embodiment, the flanking endogenous vaccinia virus genes of the third nucleotide sequence are the C2L and F3L genes. In another specific embodiment, the flanking endogenous vaccinia virus genes of the third nucleotide sequence are the C3L and F4L genes. In another specific embodiment, the flanking endogenous vaccinia virus genes of the third nucleotide sequence are the B14R and B29R genes. In another specific embodiment, the flanking endogenous vaccinia virus genes of the third nucleotide sequence are the B13R and B29R genes. In yet another embodiment, the third nucleotide sequence is in the same orientation as an endogenous vaccinia gene adjacent to the third nucleotide sequence. In a specific embodiment, the endogenous vaccinia gene adjacent to the third nucleotide sequence is the B13R gene. In certain embodiments, the nucleic acid further comprises a nucleotide sequence comprising at least one promoter operably linked to the first nucleotide sequence encoding the anti-CTLA-4 antibody. In a specific embodiment, the at least one promoter operably linked to the first nucleotide sequence encoding the anti-CTLA-4 antibody is an H5R promoter, a pS promoter, or a LEO promoter. In another specific embodiment, the at least one promoter operably linked to the first nucleotide sequence encoding the anti-CTLA-4 antibody is an H5R promoter (e.g., an early H5R promoter, a late H5R promoter, or an early H5R promoter and a late H5R promoter).

[0458] In certain embodiments, the nucleic acid further comprises a nucleotide sequence comprising at least one promoter operably linked to the second nucleotide sequence encoding the IL-12 polypeptide. In a specific embodiment, the at least one promoter operably linked to the second nucleotide sequence encoding the polypoptide is a late promoter. In further specific embodiment, the late promoter comprises the nucleotide sequence of SEQ ID NO: 561, an F17R promoter, or a D13L promoter. In another further specific embodiment, the late promoter comprises the nucleotide sequence of SEQ ID NO: 561. In another embodiment, the F17R promoter comprises the nucleotide sequence of SEQ ID NO:563. In yet another embodiment, the D13L promoter comprises the nucleotide sequence of SEQ ID NO:562.

[0459] In certain embodiments, the nucleic acid further comprises a nucleotide sequence comprising at least one promoter operably linked to the third nucleotide sequence encoding FLT3L. In a specific embodiment, the at least one promoter operably linked to the third nucleotide sequence encoding FLT3L is a B8R promoter, a B19R promoter, a E3L promoter, an F11L promoter, and/or a B2R promoter. In another specific embodiment, the at least one promoter operably linked to the third nucleotide sequence encoding FLT3L is a B8R promoter. In another specific embodiment, the at least one promoter operably linked to the third nucleotide sequence encoding FLT3L is a B19R promoter. In another specific embodiment, the at least one promoter operably linked to the third nucleotide sequence encoding FLT3L is a B8R promoter and a B19R promoter. In a particular embodiment, the B8R promoter comprises the nucleotide sequence of SEQ ID NO: 564. In a particular embodiment, the B19R promoter comprises the nucleotide sequence of SEQ ID NO: 565. In a particular embodiment, the E3L promoter comprises the nucleotide sequence of SEQ ID NO: 567. In a particular embodiment, the F11L promoter comprises the nucleotide sequence of SEQ ID NO: 568. In a particular embodiment, the B2R promoter comprises the nucleotide sequence of SEQ ID NO: 569.

[0460] In another aspect, provided herein is a nucleic acid comprising a recombinant vaccinia virus genome, comprising: (a) a vaccinia virus nucleotide sequence of SEQ ID NO: 210, which comprises partial C2L, F3L, B14R, and B29R vaccinia genes and which comprises a deletion in the B8R gene; (b) a first transgene comprising a first nucleotide sequence encoding an antibody that specifically binds to CTLA-4 (e.g., human CTLA-4), wherein the first nucleotide sequence is set forth in SEQ ID NO: 214; (c) a second transgene comprising a second nucleotide sequence encoding an IL-12 polypeptide, wherein the second nucleotide sequence is set forth in SEQ ID NO: 215; and (d) a third transgene comprising a third nucleotide sequence encoding FLT3L, wherein the third nucleotide sequence is set forth in SEQ ID NO: 216; wherein the nucleic acid further comprises: (i) a nucleotide sequence comprising at least one promoter operably linked to the first nucleotide sequence, wherein the at least one promoter operably linked to the first nucleotide sequence is an H5R promoter; (ii) a nucleotide sequence comprising at least one promoter operably linked to the second nucleotide sequence, wherein the at least one promoter operably linked to the second nucleotide sequence is a late promoter that comprises the nucleotide sequence of SEQ ID NO: 561; and (iii) a nucleotide sequence comprising at least one promoter operably linked to the third nucleotide sequence, wherein the at least one promoter operably linked to the third nucleotide sequence is a B8R promoter and a B19R promoter. In specific embodiments, the first nucleotide sequence is in the same orientation as endogenous vaccinia virus genes that flank the first nucleotide sequence, the second nucleotide sequence is in the same orientation as endogenous vaccinia virus genes that flank the second nucleotide sequence, and the third nucleotide sequence is in the same orientation as endogenous vaccinia virus genes that flank the third nucleotide sequence. In specific embodiments, the first transgene is inserted between the partial C2L and F3L vaccinia genes in SEQ ID NO: 210, and the second transgene and the third transgene are inserted into the locus of the deletion in the B8R gene. In specific embodiments, the first transgene is inserted between the partial B14R and B29R vaccinia genes in SEQ ID NO: 210, and the second transgene and the third transgene are inserted into the locus of the deletion in the B8R gene. In specific embodiments, the third transgene is upstream of the second transgene. In specific embodiments, the third transgene is downstream of the second transgene. In a particular embodiment, the B8R promoter comprises the nucleotide sequence of SEQ ID NO: 564. In a particular embodiment, the B19R promoter comprises the nucleotide sequence of SEQ ID NO: 565.

[0461] In another aspect, provided herein is a nucleic acid comprising a recombinant vaccinia virus genome, comprising: (a) a vaccinia virus nucleotide sequence of SEQ ID NO: 210, which comprises partial C2L, F3L, B14R, and B29R vaccinia genes and which comprises a deletion in the B8R gene; (b) a first transgene comprising a first nucleotide sequence encoding an antibody that specifically binds to CTLA-4 (e.g., human CTLA-4), wherein the first nucleotide sequence is set forth in SEQ ID NO: 214, and wherein the first nucleotide sequence is in the same orientation as endogenous vaccinia virus genes that flank the first nucleotide sequence and the first transgene is inserted between the partial C2L and F3L vaccinia genes in SEQ ID NO: 210; (c) a second transgene comprising a second nucleotide sequence encoding an IL-12 polypeptide, wherein the second nucleotide sequence is set forth in SEQ ID NO: 215, and wherein the second nucleotide sequence is in the same orientation as endogenous vaccinia virus genes that flank the second nucleotide sequence and the second transgene is inserted into the locus of the deletion in the B8R gene; and (d) a third transgene comprising a third nucleotide sequence encoding FLT3L, wherein the third nucleotide sequence is set forth in SEQ ID NO: 216, wherein the third nucleotide sequence is in the same orientation as endogenous vaccinia virus genes that flank the third nucleotide sequence and the third transgene is inserted into the locus of the deletion in the B8R gene, and wherein the third transgene is upstream of the second transgene; wherein the nucleic acid further comprises: (i) a nucleotide sequence comprising at least one promoter operably linked to the first nucleotide sequence, wherein the at least one promoter operably linked to the first nucleotide sequence is an H5R promoter; (ii) a nucleotide sequence comprising at least one promoter operably linked to the second nucleotide sequence, wherein the at least one promoter operably linked to the second nucleotide sequence is a late promoter that comprises the nucleotide sequence of SEQ ID NO: 561; and (iii) a nucleotide sequence comprising at least one promoter operably linked to the third nucleotide sequence, wherein the at least one promoter operably linked to the third nucleotide sequence is a B8R promoter or a B19R promoter. In specific embodiments, the at least one promoter operably linked to the third nucleotide sequence is a B8R promoter and a B19R promoter. In specific embodiments, the B8R promoter comprises the nucleotide sequence of SEQ ID NO: 564 and the B19R promoter comprises the nucleotide sequence of SEQ ID NO: 565. In specific embodiments, the at least one promoter operatively linked to the first nucleotide sequence is an H5R early promoter or an H5R late promoter. In specific embodiments, the at least one promoter operatively linked to the first nucleotide sequence is an H5R early promoter and an H5R late promoter. In specific embodiments, the H5R early promoter comprises the nucleotide sequence of SEQ ID NO: 553 and the H5R late promoter comprises the nucleotide sequence of SEQ ID NO: 554.

[0462] In another aspect, provided herein is a nucleic acid comprising a recombinant vaccinia virus genome, comprising: (a) a vaccinia virus nucleotide sequence of SEQ ID NO: 210, which comprises partial C2L, F3L, B14R, and B29R vaccinia genes and which comprises a deletion in the B8R gene; (b) a first transgene comprising a first nucleotide sequence encoding an antibody that specifically binds to CTLA-4 (e.g., human CTLA-4), wherein the first nucleotide sequence is set forth in SEQ ID NO: 214, and wherein the first nucleotide sequence is in the same orientation as endogenous vaccinia virus genes that flank the first nucleotide sequence and the first transgene is inserted between the partial C2L and F3L vaccinia genes in SEQ ID NO: 210; (c) a second transgene comprising a second nucleotide sequence encoding an IL-12 polypeptide, wherein the second nucleotide sequence is set forth in SEQ ID NO: 215, and wherein the second nucleotide sequence is in the same orientation as endogenous vaccinia virus genes that flank the second nucleotide sequence and the second transgene is inserted into the locus of the deletion in the B8R gene; and (d) a third transgene comprising a third nucleotide sequence encoding FLT3L, wherein the third nucleotide sequence is set forth in SEQ ID NO: 216, wherein the third nucleotide sequence is in the same orientation as endogenous vaccinia virus genes that flank the third nucleotide sequence and the third transgene is inserted into the locus of the deletion in the B8R gene, and wherein the third transgene is downstream of the second transgene; wherein the nucleic acid further comprises: (i) a nucleotide sequence comprising at least one promoter operably linked to the first nucleotide sequence, wherein the at least one promoter operably linked to the first nucleotide sequence is an H5R promoter; (ii) a nucleotide sequence comprising at least one promoter operably linked to the second nucleotide sequence, wherein the at least one promoter operably linked to the second nucleotide sequence is a late promoter that comprises the nucleotide sequence of SEQ ID NO: 561; and (iii) a nucleotide sequence comprising at least one promoter operably linked to the third nucleotide sequence, wherein the at least one promoter operably linked to the third nucleotide sequence is a B8R promoter or a B19R promoter. In specific embodiments, the at least one promoter operably linked to the third nucleotide sequence is a B8R promoter and a B19R promoter. In specific embodiments, the B8R promoter comprises the nucleotide sequence of SEQ ID NO: 564 and the B19R promoter comprises the nucleotide sequence of SEQ ID NO: 565. In specific embodiments, the at least one promoter operatively linked to the first nucleotide sequence is an H5R early promoter or an H5R late promoter. In specific embodiments, the at least one promoter operatively linked to the first nucleotide sequence is an H5R early promoter and an H5R late promoter. In specific embodiments, the H5R early promoter comprises the nucleotide sequence of SEQ ID NO: 553 and the H5R late promoter comprises the nucleotide sequence of SEQ ID NO: 554.

[0463] In another aspect, provided herein is a nucleic acid comprising a recombinant vaccinia virus genome, comprising: (a) a vaccinia virus nucleotide sequence of SEQ ID NO: 210, which comprises partial C2L, F3L, B14R, and B29R vaccinia genes and which comprises a deletion in the B8R gene; (b) a first transgene comprising a first nucleotide sequence encoding an antibody that specifically binds to CTLA-4 (e.g., human CTLA-4), wherein the first nucleotide sequence is set forth in SEQ ID NO: 214, and wherein the first nucleotide sequence is in the same orientation as endogenous vaccinia virus genes that flank the first nucleotide sequence and the first transgene is inserted between the partial B14R and B29R vaccinia genes in SEQ ID NO: 210; (c) a second transgene comprising a second nucleotide sequence encoding an IL-12 polypeptide, wherein the second nucleotide sequence is set forth in SEQ ID NO: 215, and wherein the second nucleotide sequence is in the same orientation as endogenous vaccinia virus genes that flank the second nucleotide sequence and the second transgene is inserted into the locus of the deletion in the B8R gene; and (d) a third transgene comprising a third nucleotide sequence encoding FLT3L, wherein the third nucleotide sequence is set forth in SEQ ID NO: 216, wherein the third nucleotide sequence is in the same orientation as endogenous vaccinia virus genes that flank the third nucleotide sequence and the third transgene is inserted into the locus of the deletion in the B8R gene, and wherein the third transgene is upstream of the second transgene; wherein the nucleic acid further comprises: (i) a nucleotide sequence comprising at least one promoter operably linked to the first nucleotide sequence, wherein the at least one promoter operably linked to the first nucleotide sequence is an H5R promoter; (ii) a nucleotide sequence comprising at least one promoter operably linked to the second nucleotide sequence, wherein the at least one promoter operably linked to the second nucleotide sequence is a late promoter that comprises the nucleotide sequence of SEQ ID NO: 561; and (iii) a nucleotide sequence comprising at least one promoter operably linked to the third nucleotide sequence, wherein the at least one promoter operably linked to the third nucleotide sequence is a B8R promoter or a B19R promoter. In specific embodiments, the at least one promoter operably linked to the third nucleotide sequence is a B8R promoter and a B19R promoter. In specific embodiments, the B8R promoter comprises the nucleotide sequence of SEQ ID NO: 564 and the B19R promoter comprises the nucleotide sequence of SEQ ID NO: 565. In specific embodiments, the at least one promoter operatively linked to the first nucleotide sequence is an H5R early promoter or an H5R late promoter. In specific embodiments, the at least one promoter operatively linked to the first nucleotide sequence is an H5R early promoter and an H5R late promoter. In specific embodiments, the H5R early promoter comprises the nucleotide sequence of SEQ ID NO: 553 and the H5R late promoter comprises the nucleotide sequence of SEQ ID NO: 554.

[0464] In another aspect, provided herein is a nucleic acid comprising a recombinant vaccinia virus genome, comprising: (a) a vaccinia virus nucleotide sequence of SEQ ID NO: 210, which comprises partial C2L, F3L, B14R, and B29R vaccinia genes and which comprises a deletion in the B8R gene; (b) a first transgene comprising a first nucleotide sequence encoding an antibody that specifically binds to CTLA-4 (e.g., human CTLA-4), wherein the first nucleotide sequence is set forth in SEQ ID NO: 214, and wherein the first nucleotide sequence is in the same orientation as endogenous vaccinia virus genes that flank the first nucleotide sequence and the first transgene is inserted between the partial B14R and B29R vaccinia genes in SEQ ID NO: 210; (c) a second transgene comprising a second nucleotide sequence encoding an IL-12 polypeptide, wherein the second nucleotide sequence is set forth in SEQ ID NO: 215, and wherein the second nucleotide sequence is in the same orientation as endogenous vaccinia virus genes that flank the second nucleotide sequence and the second transgene is inserted into the locus of the deletion in the B8R gene; and (d) a third transgene comprising a third nucleotide sequence encoding FLT3L, wherein the third nucleotide sequence is set forth in SEQ ID NO: 216, wherein the third nucleotide sequence is in the same orientation as endogenous vaccinia virus genes that flank the third nucleotide sequence and the third transgene is inserted into the locus of the deletion in the B8R gene, and wherein the third transgene is downstream of the second transgene; wherein the nucleic acid further comprises: (i) a nucleotide sequence comprising at least one promoter operably linked to the first nucleotide sequence, wherein the at least one promoter operably linked to the first nucleotide sequence is an H5R promoter; (ii) a nucleotide sequence comprising at least one promoter operably linked to the second nucleotide sequence, wherein the at least one promoter operably linked to the second nucleotide sequence is a late promoter that comprises the nucleotide sequence of SEQ ID NO: 561; and (iii) a nucleotide sequence comprising at least one promoter operably linked to the third nucleotide sequence, wherein the at least one promoter operably linked to the third nucleotide sequence is a B8R promoter or a B19R promoter. In specific embodiments, the at least one promoter operably linked to the third nucleotide sequence is a B8R promoter and a B19R promoter. In specific embodiments, the B8R promoter comprises the nucleotide sequence of SEQ ID NO: 564 and the B19R promoter comprises the nucleotide sequence of SEQ ID NO: 565. In specific embodiments, the at least one promoter operatively linked to the first nucleotide sequence is an H5R early promoter or an H5R late promoter. In specific embodiments, the at least one promoter operatively linked to the first nucleotide sequence is an H5R early promoter and an H5R late promoter. In specific embodiments, the H5R early promoter comprises the nucleotide sequence of SEQ ID NO: 553 and the H5R late promoter comprises the nucleotide sequence of SEQ ID NO: 554.

[0465] In another aspect, provided herein is a nucleic acid comprising a recombinant vaccinia virus genome, comprising: (a) a vaccinia virus nucleotide sequence of SEQ ID NO: 210, which comprises partial C2L, F3L, B14R, and B29R vaccinia genes and which comprises a deletion in the B8R gene; (b) a first transgene comprising a first nucleotide sequence encoding an antibody that specifically binds to CTLA-4 (e.g., human CTLA-4), wherein the first nucleotide sequence is set forth in SEQ ID NO: 214, and wherein the first nucleotide sequence is in the same orientation as endogenous vaccinia virus genes that flank the first nucleotide sequence and the first transgene is inserted between the partial C2L and F3L vaccinia genes in SEQ ID NO: 210; (c) a second transgene comprising a second nucleotide sequence encoding an IL-12 polypeptide, wherein the second nucleotide sequence is set forth in SEQ ID NO: 215, and wherein the second nucleotide sequence is in the same orientation as endogenous vaccinia virus genes that flank the second nucleotide sequence and the second transgene is inserted into the locus of the deletion in the B8R gene; and (d) a third transgene comprising a third nucleotide sequence encoding FLT3L, wherein the third nucleotide sequence is set forth in SEQ ID NO: 216, wherein the third nucleotide sequence is in the same orientation as endogenous vaccinia virus genes that flank the third nucleotide sequence and the third transgene is inserted into the locus of the deletion in the B8R gene, and wherein the third transgene is upstream of the second transgene; wherein the nucleic acid further comprises: (i) a nucleotide sequence comprising at least one promoter operably linked to the first nucleotide sequence, wherein the at least one promoter operably linked to the first nucleotide sequence is a pS promoter; (ii) a nucleotide sequence comprising at least one promoter operably linked to the second nucleotide sequence, wherein the at least one promoter operably linked to the second nucleotide sequence is a late promoter that comprises the nucleotide sequence of SEQ ID NO: 561; and (iii) a nucleotide sequence comprising at least one promoter operably linked to the third nucleotide sequence, wherein the at least one promoter operably linked to the third nucleotide sequence is a B8R promoter or a B19R promoter. In specific embodiments, the at least one promoter operably linked to the third nucleotide sequence is a B8R promoter and a B19R promoter. In specific embodiments, the B8R promoter comprises the nucleotide sequence of SEQ ID NO: 564 and the B19R promoter comprises the nucleotide sequence of SEQ ID NO: 565. In specific embodiments, the nucleotide sequence of the pS comprises the nucleotide sequence of SEQ ID NO: 555, SEQ ID NO: 556, or SEQ ID NO: 557.

[0466] In another aspect, provided herein is a nucleic acid comprising a recombinant vaccinia virus genome, comprising: (a) a vaccinia virus nucleotide sequence of SEQ ID NO: 210, which comprises partial C2L, F3L, B14R, and B29R vaccinia genes and which comprises a deletion in the B8R gene; (b) a first transgene comprising a first nucleotide sequence encoding an antibody that specifically binds to CTLA-4 (e.g., human CTLA-4), wherein the first nucleotide sequence is set forth in SEQ ID NO: 214, and wherein the first nucleotide sequence is in the same orientation as endogenous vaccinia virus genes that flank the first nucleotide sequence and the first transgene is inserted between the partial C2L and F3L vaccinia genes in SEQ ID NO: 210; (c) a second transgene comprising a second nucleotide sequence encoding an IL-12 polypeptide, wherein the second nucleotide sequence is set forth in SEQ ID NO: 215, and wherein the second nucleotide sequence is in the same orientation as endogenous vaccinia virus genes that flank the second nucleotide sequence and the second transgene is inserted into the locus of the deletion in the B8R gene; and (d) a third transgene comprising a third nucleotide sequence encoding FLT3L, wherein the third nucleotide sequence is set forth in SEQ ID NO: 216, wherein the third nucleotide sequence is in the same orientation as endogenous vaccinia virus genes that flank the third nucleotide sequence and the third transgene is inserted into the locus of the deletion in the B8R gene, and wherein the third transgene is downstream of the second transgene; wherein the nucleic acid further comprises: (i) a nucleotide sequence comprising at least one promoter operably linked to the first nucleotide sequence, wherein the at least one promoter operably linked to the first nucleotide sequence is a pS promoter; (ii) a nucleotide sequence comprising at least one promoter operably linked to the second nucleotide sequence, wherein the at least one promoter operably linked to the second nucleotide sequence is a late promoter that comprises the nucleotide sequence of SEQ ID NO: 561; and (iii) a nucleotide sequence comprising at least one promoter operably linked to the third nucleotide sequence, wherein the at least one promoter operably linked to the third nucleotide sequence is a B8R promoter or a B19R promoter. In specific embodiments, the at least one promoter operably linked to the third nucleotide sequence is a B8R promoter and a B19R promoter. In specific embodiments, the B8R promoter comprises the nucleotide sequence of SEQ ID NO: 564 and the B19R promoter comprises the nucleotide sequence of SEQ ID NO: 565. In specific embodiments, the nucleotide sequence of the pS comprises the nucleotide sequence of SEQ ID NO: 555, SEQ ID NO: 556, or SEQ ID NO: 557.

[0467] In another aspect, provided herein is a nucleic acid comprising a recombinant vaccinia virus genome, comprising: (a) a vaccinia virus nucleotide sequence of SEQ ID NO: 210, which comprises partial C2L, F3L, B14R, and B29R vaccinia genes and which comprises a deletion in the B8R gene; (b) a first transgene comprising a first nucleotide sequence encoding an antibody that specifically binds to CTLA-4 (e.g., human CTLA-4), wherein the first nucleotide sequence is set forth in SEQ ID NO: 214, and wherein the first nucleotide sequence is in the same orientation as endogenous vaccinia virus genes that flank the first nucleotide sequence and the first transgene is inserted between the partial B14R and B29R vaccinia genes in SEQ ID NO: 210; (c) a second transgene comprising a second nucleotide sequence encoding an IL-12 polypeptide, wherein the second nucleotide sequence is set forth in SEQ ID NO: 215, and wherein the second nucleotide sequence is in the same orientation as endogenous vaccinia virus genes that flank the second nucleotide sequence and the second transgene is inserted into the locus of the deletion in the B8R gene; and (d) a third transgene comprising a third nucleotide sequence encoding FLT3L, wherein the third nucleotide sequence is set forth in SEQ ID NO: 216, wherein the third nucleotide sequence is in the same orientation as endogenous vaccinia virus genes that flank the third nucleotide sequence and the third transgene is inserted into the locus of the deletion in the B8R gene, and wherein the third transgene is upstream of the second transgene; wherein the nucleic acid further comprises: (i) a nucleotide sequence comprising at least one promoter operably linked to the first nucleotide sequence, wherein the at least one promoter operably linked to the first nucleotide sequence is a pS promoter; (ii) a nucleotide sequence comprising at least one promoter operably linked to the second nucleotide sequence, wherein the at least one promoter operably linked to the second nucleotide sequence is a late promoter that comprises the nucleotide sequence of SEQ ID NO: 561; and (iii) a nucleotide sequence comprising at least one promoter operably linked to the third nucleotide sequence, wherein the at least one promoter operably linked to the third nucleotide sequence is a B8R promoter or a B19R promoter. In specific embodiments, the at least one promoter operably linked to the third nucleotide sequence is a B8R promoter and a B19R promoter. In specific embodiments, the B8R promoter comprises the nucleotide sequence of SEQ ID NO: 564 and the B19R promoter comprises the nucleotide sequence of SEQ ID NO: 565. In specific embodiments, the nucleotide sequence of the pS comprises the nucleotide sequence of SEQ ID NO: 555, SEQ ID NO: 556, or SEQ ID NO: 557.

[0468] In another aspect, provided herein is a nucleic acid comprising a recombinant vaccinia virus genome, comprising: (a) a vaccinia virus nucleotide sequence of SEQ ID NO: 210, which comprises partial C2L, F3L, B14R, and B29R vaccinia genes and which comprises a deletion in the B8R gene; (b) a first transgene comprising a first nucleotide sequence encoding an antibody that specifically binds to CTLA-4 (e.g., human CTLA-4), wherein the first nucleotide sequence is set forth in SEQ ID NO: 214, and wherein the first nucleotide sequence is in the same orientation as endogenous vaccinia virus genes that flank the first nucleotide sequence and the first transgene is inserted between the partial B14R and B29R vaccinia genes in SEQ ID NO: 210; (c) a second transgene comprising a second nucleotide sequence encoding an IL-12 polypeptide, wherein the second nucleotide sequence is set forth in SEQ ID NO: 215, and wherein the second nucleotide sequence is in the same orientation as endogenous vaccinia virus genes that flank the second nucleotide sequence and the second transgene is inserted into the locus of the deletion in the B8R gene; and (d) a third transgene comprising a third nucleotide sequence encoding FLT3L, wherein the third nucleotide sequence is set forth in SEQ ID NO: 216, wherein the third nucleotide sequence is in the same orientation as endogenous vaccinia virus genes that flank the third nucleotide sequence and the third transgene is inserted into the locus of the deletion in the B8R gene, and wherein the third transgene is downstream of the second transgene; wherein the nucleic acid further comprises: (i) a nucleotide sequence comprising at least one promoter operably linked to the first nucleotide sequence, wherein the at least one promoter operably linked to the first nucleotide sequence is a pS promoter; (ii) a nucleotide sequence comprising at least one promoter operably linked to the second nucleotide sequence, wherein the at least one promoter operably linked to the second nucleotide sequence is a late promoter that comprises the nucleotide sequence of SEQ ID NO: 561; and (iii) a nucleotide sequence comprising at least one promoter operably linked to the third nucleotide sequence, wherein the at least one promoter operably linked to the third nucleotide sequence is a B8R promoter or a B19R promoter. In specific embodiments, the at least one promoter operably linked to the third nucleotide sequence is a B8R promoter and a B19R promoter. In specific embodiments, the B8R promoter comprises the nucleotide sequence of SEQ ID NO: 564 and the B19R promoter comprises the nucleotide sequence of SEQ ID NO: 565. In specific embodiments, the nucleotide sequence of the pS comprises the nucleotide sequence of SEQ ID NO: 555, SEQ ID NO: 556, or SEQ ID NO: 557.

[0469] In another aspect, provided herein is a nucleic acid comprising a recombinant vaccinia virus genome, comprising: (a) a vaccinia virus nucleotide sequence of SEQ ID NO: 210, which comprises partial C2L, F3L, B14R, and B29R vaccinia genes and which comprises a deletion in the B8R gene; (b) a first transgene comprising a first nucleotide sequence encoding an antibody that specifically binds to CTLA-4 (e.g., human CTLA-4), wherein the first nucleotide sequence is set forth in SEQ ID NO: 214, and wherein the first nucleotide sequence is in the same orientation as endogenous vaccinia virus genes that flank the first nucleotide sequence and the first transgene is inserted between the partial C2L and F3L vaccinia genes in SEQ ID NO: 210; (c) a second transgene comprising a second nucleotide sequence encoding an IL-12 polypeptide, wherein the second nucleotide sequence is set forth in SEQ ID NO: 215, and wherein the second nucleotide sequence is in the same orientation as endogenous vaccinia virus genes that flank the second nucleotide sequence and the second transgene is inserted into the locus of the deletion in the B8R gene; and (d) a third transgene comprising a third nucleotide sequence encoding FLT3L, wherein the third nucleotide sequence is set forth in SEQ ID NO: 216, wherein the third nucleotide sequence is in the same orientation as endogenous vaccinia virus genes that flank the third nucleotide sequence and the third transgene is inserted into the locus of the deletion in the B8R gene, and wherein the third transgene is upstream of the second transgene; wherein the nucleic acid further comprises: (i) a nucleotide sequence comprising at least one promoter operably linked to the first nucleotide sequence, wherein the at least one promoter operably linked to the first nucleotide sequence is an H5R promoter; (ii) a nucleotide sequence comprising at least one promoter operably linked to the second nucleotide sequence, wherein the at least one promoter operably linked to the second nucleotide sequence is an F17R promoter; and (iii) a nucleotide sequence comprising at least one promoter operably linked to the third nucleotide sequence, wherein the at least one promoter operably linked to the third nucleotide sequence is a B8R promoter or a B19R promoter. In specific embodiments, the at least one promoter operably linked to the third nucleotide sequence is a B8R promoter and a B19R promoter. In specific embodiments, the B8R promoter comprises the nucleotide sequence of SEQ ID NO: 564 and the B19R promoter comprises the nucleotide sequence of SEQ ID NO: 565. In specific embodiments, the at least one promoter operatively linked to the first nucleotide sequence is an H5R early promoter or an H5R late promoter. In specific embodiments, the at least one promoter operatively linked to the first nucleotide sequence is an H5R early promoter and an H5R late promoter. In specific embodiments, the H5R early promoter comprises the nucleotide sequence of SEQ ID NO: 553 and the H5R late promoter comprises the nucleotide sequence of SEQ ID NO: 554. In specific embodiments, nucleotide sequence of the F17R promoter comprises the nucleotide sequence of SEQ ID NO: 563.

[0470] In another aspect, provided herein is a nucleic acid comprising a recombinant vaccinia virus genome, comprising: (a) a vaccinia virus nucleotide sequence of SEQ ID NO: 210, which comprises partial C2L, F3L, B14R, and B29R vaccinia genes and which comprises a deletion in the B8R gene; (b) a first transgene comprising a first nucleotide sequence encoding an antibody that specifically binds to CTLA-4 (e.g., human CTLA-4), wherein the first nucleotide sequence is set forth in SEQ ID NO: 214, and wherein the first nucleotide sequence is in the same orientation as endogenous vaccinia virus genes that flank the first nucleotide sequence and the first transgene is inserted between the partial C2L and F3L vaccinia genes in SEQ ID NO: 210; (c) a second transgene comprising a second nucleotide sequence encoding an IL-12 polypeptide, wherein the second nucleotide sequence is set forth in SEQ ID NO: 215, and wherein the second nucleotide sequence is in the same orientation as endogenous vaccinia virus genes that flank the second nucleotide sequence and the second transgene is inserted into the locus of the deletion in the B8R gene; and (d) a third transgene comprising a third nucleotide sequence encoding FLT3L, wherein the third nucleotide sequence is set forth in SEQ ID NO: 216, wherein the third nucleotide sequence is in the same orientation as endogenous vaccinia virus genes that flank the third nucleotide sequence and the third transgene is inserted into the locus of the deletion in the B8R gene, and wherein the third transgene is downstream of the second transgene; wherein the nucleic acid further comprises: (i) a nucleotide sequence comprising at least one promoter operably linked to the first nucleotide sequence, wherein the at least one promoter operably linked to the first nucleotide sequence is an H5R promoter; (ii) a nucleotide sequence comprising at least one promoter operably linked to the second nucleotide sequence, wherein the at least one promoter operably linked to the second nucleotide sequence is an F17R promoter; and (iii) a nucleotide sequence comprising at least one promoter operably linked to the third nucleotide sequence, wherein the at least one promoter operably linked to the third nucleotide sequence is a B8R promoter or a B19R promoter. In specific embodiments, the at least one promoter operably linked to the third nucleotide sequence is a B8R promoter and a B19R promoter. In specific embodiments, the B8R promoter comprises the nucleotide sequence of SEQ ID NO: 564 and the B19R promoter comprises the nucleotide sequence of SEQ ID NO: 565. In specific embodiments, the at least one promoter operatively linked to the first nucleotide sequence is an H5R early promoter or an H5R late promoter. In specific embodiments, the at least one promoter operatively linked to the first nucleotide sequence is an H5R early promoter and an H5R late promoter. In specific embodiments, the H5R early promoter comprises the nucleotide sequence of SEQ ID NO: 553 and the H5R late promoter comprises the nucleotide sequence of SEQ ID NO: 554. In specific embodiments, nucleotide sequence of the F17R promoter comprises the nucleotide sequence of SEQ ID NO: 563.

[0471] In another aspect, provided herein is a nucleic acid comprising a recombinant vaccinia virus genome, comprising: (a) a vaccinia virus nucleotide sequence of SEQ ID NO: 210, which comprises partial C2L, F3L, B14R, and B29R vaccinia genes and which comprises a deletion in the B8R gene; (b) a first transgene comprising a first nucleotide sequence encoding an antibody that specifically binds to CTLA-4 (e.g., human CTLA-4), wherein the first nucleotide sequence is set forth in SEQ ID NO: 214, and wherein the first nucleotide sequence is in the same orientation as endogenous vaccinia virus genes that flank the first nucleotide sequence and the first transgene is inserted between the partial B14R and B29R vaccinia genes in SEQ ID NO: 210; (c) a second transgene comprising a second nucleotide sequence encoding an IL-12 polypeptide, wherein the second nucleotide sequence is set forth in SEQ ID NO: 215, and wherein the second nucleotide sequence is in the same orientation as endogenous vaccinia virus genes that flank the second nucleotide sequence and the second transgene is inserted into the locus of the deletion in the B8R gene; and (d) a third transgene comprising a third nucleotide sequence encoding FLT3L, wherein the third nucleotide sequence is set forth in SEQ ID NO: 216, wherein the third nucleotide sequence is in the same orientation as endogenous vaccinia virus genes that flank the third nucleotide sequence and the third transgene is inserted into the locus of the deletion in the B8R gene, and wherein the third transgene is upstream of the second transgene; wherein the nucleic acid further comprises: (i) a nucleotide sequence comprising at least one promoter operably linked to the first nucleotide sequence, wherein the at least one promoter operably linked to the first nucleotide sequence is an H5R promoter; (ii) a nucleotide sequence comprising at least one promoter operably linked to the second nucleotide sequence, wherein the at least one promoter operably linked to the second nucleotide sequence is an F17R promoter; and (iii) a nucleotide sequence comprising at least one promoter operably linked to the third nucleotide sequence, wherein the at least one promoter operably linked to the third nucleotide sequence is a B8R promoter or a B19R promoter. In specific embodiments, the at least one promoter operably linked to the third nucleotide sequence is a B8R promoter and a B19R promoter. In specific embodiments, the B8R promoter comprises the nucleotide sequence of SEQ ID NO: 564 and the B19R promoter comprises the nucleotide sequence of SEQ ID NO: 565. In specific embodiments, the at least one promoter operatively linked to the first nucleotide sequence is an H5R early promoter or an H5R late promoter. In specific embodiments, the at least one promoter operatively linked to the first nucleotide sequence is an H5R early promoter and an H5R late promoter. In specific embodiments, the H5R early promoter comprises the nucleotide sequence of SEQ ID NO: 553 and the H5R late promoter comprises the nucleotide sequence of SEQ ID NO: 554. In specific embodiments, nucleotide sequence of the F17R promoter comprises the nucleotide sequence of SEQ ID NO: 563.

[0472] In another aspect, provided herein is a nucleic acid comprising a recombinant vaccinia virus genome, comprising: (a) a vaccinia virus nucleotide sequence of SEQ ID NO: 210, which comprises partial C2L, F3L, B14R, and B29R vaccinia genes and which comprises a deletion in the B8R gene; (b) a first transgene comprising a first nucleotide sequence encoding an antibody that specifically binds to CTLA-4 (e.g., human CTLA-4), wherein the first nucleotide sequence is set forth in SEQ ID NO: 214, and wherein the first nucleotide sequence is in the same orientation as endogenous vaccinia virus genes that flank the first nucleotide sequence and the first transgene is inserted between the partial B14R and B29R vaccinia genes in SEQ ID NO: 210; (c) a second transgene comprising a second nucleotide sequence encoding an IL-12 polypeptide, wherein the second nucleotide sequence is set forth in SEQ ID NO: 215, and wherein the second nucleotide sequence is in the same orientation as endogenous vaccinia virus genes that flank the second nucleotide sequence and the second transgene is inserted into the locus of the deletion in the B8R gene; and (d) a third transgene comprising a third nucleotide sequence encoding FLT3L, wherein the third nucleotide sequence is set forth in SEQ ID NO: 216, wherein the third nucleotide sequence is in the same orientation as endogenous vaccinia virus genes that flank the third nucleotide sequence and the third transgene is inserted into the locus of the deletion in the B8R gene, and wherein the third transgene is downstream of the second transgene; wherein the nucleic acid further comprises: (i) a nucleotide sequence comprising at least one promoter operably linked to the first nucleotide sequence, wherein the at least one promoter operably linked to the first nucleotide sequence is an H5R promoter; (ii) a nucleotide sequence comprising at least one promoter operably linked to the second nucleotide sequence, wherein the at least one promoter operably linked to the second nucleotide sequence is an F17R promoter; and (iii) a nucleotide sequence comprising at least one promoter operably linked to the third nucleotide sequence, wherein the at least one promoter operably linked to the third nucleotide sequence is a B8R promoter and a B19R promoter. In specific embodiments, the at least one promoter operably linked to the third nucleotide sequence is a B8R promoter and a B19R promoter. In specific embodiments, the B8R promoter comprises the nucleotide sequence of SEQ ID NO: 564 and the B19R promoter comprises the nucleotide sequence of SEQ ID NO: 565. In specific embodiments, the at least one promoter operatively linked to the first nucleotide sequence is an H5R early promoter or an H5R late promoter. In specific embodiments, the at least one promoter operatively linked to the first nucleotide sequence is an H5R early promoter and an H5R late promoter. In specific embodiments, the H5R early promoter comprises the nucleotide sequence of SEQ ID NO: 553 and the H5R late promoter comprises the nucleotide sequence of SEQ ID NO: 554. In specific embodiments, nucleotide sequence of the F17R promoter comprises the nucleotide sequence of SEQ ID NO: 563.

[0473] In another aspect, provided herein is a nucleic acid comprising a recombinant vaccinia virus genome, comprising: (a) a vaccinia virus nucleotide sequence of SEQ ID NO: 210, which comprises partial C2L, F3L, B14R, and B29R vaccinia genes and which comprises a deletion in the B8R gene; (b) a first transgene comprising a first nucleotide sequence encoding an antibody that specifically binds to CTLA-4 (e.g., human CTLA-4), wherein the first nucleotide sequence is set forth in SEQ ID NO: 214, and wherein the first nucleotide sequence is in the same orientation as endogenous vaccinia virus genes that flank the first nucleotide sequence and the first transgene is inserted between the partial C2L and F3L vaccinia genes in SEQ ID NO: 210; (c) a second transgene comprising a second nucleotide sequence encoding an IL-12 polypeptide, wherein the second nucleotide sequence is set forth in SEQ ID NO: 215, and wherein the second nucleotide sequence is in the same orientation as endogenous vaccinia virus genes that flank the second nucleotide sequence and the second transgene is inserted into the locus of the deletion in the B8R gene; and (d) a third transgene comprising a third nucleotide sequence encoding FLT3L, wherein the third nucleotide sequence is set forth in SEQ ID NO: 216, wherein the third nucleotide sequence is in the same orientation as endogenous vaccinia virus genes that flank the third nucleotide sequence and the third transgene is inserted into the locus of the deletion in the B8R gene, and wherein the third transgene is upstream of the second transgene; wherein the nucleic acid further comprises: (i) a nucleotide sequence comprising at least one promoter operably linked to the first nucleotide sequence, wherein the at least one promoter operably linked to the first nucleotide sequence is an H5R promoter; (ii) a nucleotide sequence comprising at least one promoter operably linked to the second nucleotide sequence, wherein the at least one promoter operably linked to the second nucleotide sequence is a late promoter that comprises the nucleotide sequence of SEQ ID NO: 561; and (iii) a nucleotide sequence comprising at least one promoter operably linked to the third nucleotide sequence, wherein the at least one promoter operably linked to the third nucleotide sequence is a E3L promoter. In specific embodiments, the at least one promoter operatively linked to the first nucleotide sequence is an H5R early promoter or an H5R late promoter. In specific embodiments, the at least one promoter operatively linked to the first nucleotide sequence is an H5R early promoter and an H5R late promoter. In specific embodiments, the H5R early promoter comprises the nucleotide sequence of SEQ ID NO: 553 and the H5R late promoter comprises the nucleotide sequence of SEQ ID NO: 554. In specific embodiments, nucleotide sequence of the E3L promoter comprises the nucleotide sequence of SEQ ID NO: 567.

[0474] In another aspect, provided herein is a nucleic acid comprising a recombinant vaccinia virus genome, comprising: (a) a vaccinia virus nucleotide sequence of SEQ ID NO: 210, which comprises partial C2L, F3L, B14R, and B29R vaccinia genes and which comprises a deletion in the B8R gene; (b) a first transgene comprising a first nucleotide sequence encoding an antibody that specifically binds to CTLA-4 (e.g., human CTLA-4), wherein the first nucleotide sequence is set forth in SEQ ID NO: 214, and wherein the first nucleotide sequence is in the same orientation as endogenous vaccinia virus genes that flank the first nucleotide sequence and the first transgene is inserted between the partial C2L and F3L vaccinia genes in SEQ ID NO: 210; (c) a second transgene comprising a second nucleotide sequence encoding an IL-12 polypeptide, wherein the second nucleotide sequence is set forth in SEQ ID NO: 215, and wherein the second nucleotide sequence is in the same orientation as endogenous vaccinia virus genes that flank the second nucleotide sequence and the second transgene is inserted into the locus of the deletion in the B8R gene; and (d) a third transgene comprising a third nucleotide sequence encoding FLT3L, wherein the third nucleotide sequence is set forth in SEQ ID NO: 216, wherein the third nucleotide sequence is in the same orientation as endogenous vaccinia virus genes that flank the third nucleotide sequence and the third transgene is inserted into the locus of the deletion in the B8R gene, and wherein the third transgene is downstream of the second transgene; wherein the nucleic acid further comprises: (i) a nucleotide sequence comprising at least one promoter operably linked to the first nucleotide sequence, wherein the at least one promoter operably linked to the first nucleotide sequence is an H5R promoter; (ii) a nucleotide sequence comprising at least one promoter operably linked to the second nucleotide sequence, wherein the at least one promoter operably linked to the second nucleotide sequence is a late promoter that comprises the nucleotide sequence of SEQ ID NO: 561; and (iii) a nucleotide sequence comprising at least one promoter operably linked to the third nucleotide sequence, wherein the at least one promoter operably linked to the third nucleotide sequence is a E3L promoter. In specific embodiments, the at least one promoter operatively linked to the first nucleotide sequence is an H5R early promoter or an H5R late promoter. In specific embodiments, the at least one promoter operatively linked to the first nucleotide sequence is an H5R early promoter and an H5R late promoter. In specific embodiments, the H5R early promoter comprises the nucleotide sequence of SEQ ID NO: 553 and the H5R late promoter comprises the nucleotide sequence of SEQ ID NO: 554. In specific embodiments, nucleotide sequence of the E3L promoter comprises the nucleotide sequence of SEQ ID NO: 567.

[0475] In another aspect, provided herein is a nucleic acid comprising a recombinant vaccinia virus genome, comprising: (a) a vaccinia virus nucleotide sequence of SEQ ID NO: 210, which comprises partial C2L, F3L, B14R, and B29R vaccinia genes and which comprises a deletion in the B8R gene; (b) a first transgene comprising a first nucleotide sequence encoding an antibody that specifically binds to CTLA-4 (e.g., human CTLA-4), wherein the first nucleotide sequence is set forth in SEQ ID NO: 214, and wherein the first nucleotide sequence is in the same orientation as endogenous vaccinia virus genes that flank the first nucleotide sequence and the first transgene is inserted between the partial B14R and B29R vaccinia genes in SEQ ID NO: 210; (c) a second transgene comprising a second nucleotide sequence encoding an IL-12 polypeptide, wherein the second nucleotide sequence is set forth in SEQ ID NO: 215, and wherein the second nucleotide sequence is in the same orientation as endogenous vaccinia virus genes that flank the second nucleotide sequence and the second transgene is inserted into the locus of the deletion in the B8R gene; and (d) a third transgene comprising a third nucleotide sequence encoding FLT3L, wherein the third nucleotide sequence is set forth in SEQ ID NO: 216, wherein the third nucleotide sequence is in the same orientation as endogenous vaccinia virus genes that flank the third nucleotide sequence and the third transgene is inserted into the locus of the deletion in the B8R gene, and wherein the third transgene is upstream of the second transgene; wherein the nucleic acid further comprises: (i) a nucleotide sequence comprising at least one promoter operably linked to the first nucleotide sequence, wherein the at least one promoter operably linked to the first nucleotide sequence is an H5R promoter; (ii) a nucleotide sequence comprising at least one promoter operably linked to the second nucleotide sequence, wherein the at least one promoter operably linked to the second nucleotide sequence is a late promoter that comprises the nucleotide sequence of SEQ ID NO: 561; and (iii) a nucleotide sequence comprising at least one promoter operably linked to the third nucleotide sequence, wherein the at least one promoter operably linked to the third nucleotide sequence is a E3L promoter. In specific embodiments, the at least one promoter operatively linked to the first nucleotide sequence is an H5R early promoter or an H5R late promoter. In specific embodiments, the at least one promoter operatively linked to the first nucleotide sequence is an H5R early promoter and an H5R late promoter. In specific embodiments, the H5R early promoter comprises the nucleotide sequence of SEQ ID NO: 553 and the H5R late promoter comprises the nucleotide sequence of SEQ ID NO: 554. In specific embodiments, nucleotide sequence of the E3L promoter comprises the nucleotide sequence of SEQ ID NO: 567.

[0476] In another aspect, provided herein is a nucleic acid comprising a recombinant vaccinia virus genome, comprising: (a) a vaccinia virus nucleotide sequence of SEQ ID NO: 210, which comprises partial C2L, F3L, B14R, and B29R vaccinia genes and which comprises a deletion in the B8R gene; (b) a first transgene comprising a first nucleotide sequence encoding an antibody that specifically binds to CTLA-4 (e.g., human CTLA-4), wherein the first nucleotide sequence is set forth in SEQ ID NO: 214, and wherein the first nucleotide sequence is in the same orientation as endogenous vaccinia virus genes that flank the first nucleotide sequence and the first transgene is inserted between the partial B14R and B29R vaccinia genes in SEQ ID NO: 210; (c) a second transgene comprising a second nucleotide sequence encoding an IL-12 polypeptide, wherein the second nucleotide sequence is set forth in SEQ ID NO: 215, and wherein the second nucleotide sequence is in the same orientation as endogenous vaccinia virus genes that flank the second nucleotide sequence and the second transgene is inserted into the locus of the deletion in the B8R gene; and (d) a third transgene comprising a third nucleotide sequence encoding FLT3L, wherein the third nucleotide sequence is set forth in SEQ ID NO: 216, wherein the third nucleotide sequence is in the same orientation as endogenous vaccinia virus genes that flank the third nucleotide sequence and the third transgene is inserted into the locus of the deletion in the B8R gene, and wherein the third transgene is downstream of the second transgene; wherein the nucleic acid further comprises: (i) a nucleotide sequence comprising at least one promoter operably linked to the first nucleotide sequence, wherein the at least one promoter operably linked to the first nucleotide sequence is an H5R promoter; (ii) a nucleotide sequence comprising at least one promoter operably linked to the second nucleotide sequence, wherein the at least one promoter operably linked to the second nucleotide sequence is a late promoter that comprises the nucleotide sequence of SEQ ID NO: 561; and (iii) a nucleotide sequence comprising at least one promoter operably linked to the third nucleotide sequence, wherein the at least one promoter operably linked to the third nucleotide sequence is a E3L promoter. In specific embodiments, the at least one promoter operatively linked to the first nucleotide sequence is an H5R early promoter or an H5R late promoter. In specific embodiments, the at least one promoter operatively linked to the first nucleotide sequence is an H5R early promoter and an H5R late promoter. In specific embodiments, the H5R early promoter comprises the nucleotide sequence of SEQ ID NO: 553 and the H5R late promoter comprises the nucleotide sequence of SEQ ID NO: 554. In specific embodiments, nucleotide sequence of the E3L promoter comprises the nucleotide sequence of SEQ ID NO: 567.

[0477] In another aspect, provided herein is a nucleic acid comprising a recombinant vaccinia virus genome, comprising: (a) a vaccinia virus nucleotide sequence of SEQ ID NO: 210, which comprises partial C2L, F3L, B14R, and B29R vaccinia genes and which comprises a deletion in the B8R gene; (b) a first transgene comprising a first nucleotide sequence encoding an antibody that specifically binds to CTLA-4 (e.g., human CTLA-4), wherein the first nucleotide sequence is set forth in SEQ ID NO: 214, and wherein the first nucleotide sequence is in the same orientation as endogenous vaccinia virus genes that flank the first nucleotide sequence and the first transgene is inserted between the partial C2L and F3L vaccinia genes in SEQ ID NO: 210; (c) a second transgene comprising a second nucleotide sequence encoding an IL-12 polypeptide, wherein the second nucleotide sequence is set forth in SEQ ID NO: 215, and wherein the second nucleotide sequence is in the same orientation as endogenous vaccinia virus genes that flank the second nucleotide sequence and the second transgene is inserted into the locus of the deletion in the B8R gene; and (d) a third transgene comprising a third nucleotide sequence encoding FLT3L, wherein the third nucleotide sequence is set forth in SEQ ID NO: 216, wherein the third nucleotide sequence is in the same orientation as endogenous vaccinia virus genes that flank the third nucleotide sequence and the third transgene is inserted into the locus of the deletion in the B8R gene, and wherein the third transgene is upstream of the second transgene; wherein the nucleic acid further comprises: (i) a nucleotide sequence comprising at least one promoter operably linked to the first nucleotide sequence, wherein the at least one promoter operably linked to the first nucleotide sequence is a pS promoter; (ii) a nucleotide sequence comprising at least one promoter operably linked to the second nucleotide sequence, wherein the at least one promoter operably linked to the second nucleotide sequence an F17R promoter; and (iii) a nucleotide sequence comprising at least one promoter operably linked to the third nucleotide sequence, wherein the at least one promoter operably linked to the third nucleotide sequence is a E3L promoter. In specific embodiments, the nucleotide sequence of the pS promoter comprises the nucleotide sequence of SEQ ID NO: 555, SEQ ID NO: 556, or SEQ ID NO: 557. In specific embodiments, the nucleotide sequence of the F17R promoter comprises the nucleotide sequence of SEQ ID NO: 563. In specific embodiments, the nucleotide sequence of the E3L promoter comprises the nucleotide sequence of SEQ ID NO: 567.

[0478] In another aspect, provided herein is a nucleic acid comprising a recombinant vaccinia virus genome, comprising: (a) a vaccinia virus nucleotide sequence of SEQ ID NO: 210, which comprises partial C2L, F3L, B14R, and B29R vaccinia genes and which comprises a deletion in the B8R gene; (b) a first transgene comprising a first nucleotide sequence encoding an antibody that specifically binds to CTLA-4 (e.g., human CTLA-4), wherein the first nucleotide sequence is set forth in SEQ ID NO: 214, and wherein the first nucleotide sequence is in the same orientation as endogenous vaccinia virus genes that flank the first nucleotide sequence and the first transgene is inserted between the partial C2L and F3L vaccinia genes in SEQ ID NO: 210; (c) a second transgene comprising a second nucleotide sequence encoding an IL-12 polypeptide, wherein the second nucleotide sequence is set forth in SEQ ID NO: 215, and wherein the second nucleotide sequence is in the same orientation as endogenous vaccinia virus genes that flank the second nucleotide sequence and the second transgene is inserted into the locus of the deletion in the B8R gene; and (d) a third transgene comprising a third nucleotide sequence encoding FLT3L, wherein the third nucleotide sequence is set forth in SEQ ID NO: 216, wherein the third nucleotide sequence is in the same orientation as endogenous vaccinia virus genes that flank the third nucleotide sequence and the third transgene is inserted into the locus of the deletion in the B8R gene, and wherein the third transgene is downstream of the second transgene; wherein the nucleic acid further comprises: (i) a nucleotide sequence comprising at least one promoter operably linked to the first nucleotide sequence, wherein the at least one promoter operably linked to the first nucleotide sequence is a pS promoter; (ii) a nucleotide sequence comprising at least one promoter operably linked to the second nucleotide sequence, wherein the at least one promoter operably linked to the second nucleotide sequence is an F17R promoter; and (iii) a nucleotide sequence comprising at least one promoter operably linked to the third nucleotide sequence, wherein the at least one promoter operably linked to the third nucleotide sequence is a E3L promoter. In specific embodiments, the nucleotide sequence of the pS promoter comprises the nucleotide sequence of SEQ ID NO: 555, SEQ ID NO: 556, or SEQ ID NO: 557. In specific embodiments, the nucleotide sequence of the F17R promoter comprises the nucleotide sequence of SEQ ID NO: 563. In specific embodiments, the nucleotide sequence of the E3L promoter comprises the nucleotide sequence of SEQ ID NO: 567.

[0479] In another aspect, provided herein is a nucleic acid comprising a recombinant vaccinia virus genome, comprising: (a) a vaccinia virus nucleotide sequence of SEQ ID NO: 210, which comprises partial C2L, F3L, B14R, and B29R vaccinia genes and which comprises a deletion in the B8R gene; (b) a first transgene comprising a first nucleotide sequence encoding an antibody that specifically binds to CTLA-4 (e.g., human CTLA-4), wherein the first nucleotide sequence is set forth in SEQ ID NO: 214, and wherein the first nucleotide sequence is in the same orientation as endogenous vaccinia virus genes that flank the first nucleotide sequence and the first transgene is inserted between the partial B14R and B29R vaccinia genes in SEQ ID NO: 210; (c) a second transgene comprising a second nucleotide sequence encoding an IL-12 polypeptide, wherein the second nucleotide sequence is set forth in SEQ ID NO: 215, and wherein the second nucleotide sequence is in the same orientation as endogenous vaccinia virus genes that flank the second nucleotide sequence and the second transgene is inserted into the locus of the deletion in the B8R gene; and (d) a third transgene comprising a third nucleotide sequence encoding FLT3L, wherein the third nucleotide sequence is set forth in SEQ ID NO: 216, wherein the third nucleotide sequence is in the same orientation as endogenous vaccinia virus genes that flank the third nucleotide sequence and the third transgene is inserted into the locus of the deletion in the B8R gene, and wherein the third transgene is upstream of the second transgene; wherein the nucleic acid further comprises: (i) a nucleotide sequence comprising at least one promoter operably linked to the first nucleotide sequence, wherein the at least one promoter operably linked to the first nucleotide sequence is a pS promoter; (ii) a nucleotide sequence comprising at least one promoter operably linked to the second nucleotide sequence, wherein the at least one promoter operably linked to the second nucleotide sequence is an F17R promoter; and (iii) a nucleotide sequence comprising at least one promoter operably linked to the third nucleotide sequence, wherein the at least one promoter operably linked to the third nucleotide sequence is a E3L promoter. In specific embodiments, the nucleotide sequence of the pS promoter comprises the nucleotide sequence of SEQ ID NO: 555, SEQ ID NO: 556, or SEQ ID NO: 557. In specific embodiments, the nucleotide sequence of the F17R promoter comprises the nucleotide sequence of SEQ ID NO: 563. In specific embodiments, the nucleotide sequence of the E3L promoter comprises the nucleotide sequence of SEQ ID NO: 567.

[0480] In another aspect, provided herein is a nucleic acid comprising a recombinant vaccinia virus genome, comprising: (a) a vaccinia virus nucleotide sequence of SEQ ID NO: 210, which comprises partial C2L, F3L, B14R, and B29R vaccinia genes and which comprises a deletion in the B8R gene; (b) a first transgene comprising a first nucleotide sequence encoding an antibody that specifically binds to CTLA-4 (e.g., human CTLA-4), wherein the first nucleotide sequence is set forth in SEQ ID NO: 214, and wherein the first nucleotide sequence is in the same orientation as endogenous vaccinia virus genes that flank the first nucleotide sequence and the first transgene is inserted between the partial B14R and B29R vaccinia genes in SEQ ID NO: 210; (c) a second transgene comprising a second nucleotide sequence encoding an IL-12 polypeptide, wherein the second nucleotide sequence is set forth in SEQ ID NO: 215, and wherein the second nucleotide sequence is in the same orientation as endogenous vaccinia virus genes that flank the second nucleotide sequence and the second transgene is inserted into the locus of the deletion in the B8R gene; and (d) a third transgene comprising a third nucleotide sequence encoding FLT3L, wherein the third nucleotide sequence is set forth in SEQ ID NO: 216, wherein the third nucleotide sequence is in the same orientation as endogenous vaccinia virus genes that flank the third nucleotide sequence and the third transgene is inserted into the locus of the deletion in the B8R gene, and wherein the third transgene is downstream of the second transgene; wherein the nucleic acid further comprises: (i) a nucleotide sequence comprising at least one promoter operably linked to the first nucleotide sequence, wherein the at least one promoter operably linked to the first nucleotide sequence is a pS promoter; (ii) a nucleotide sequence comprising at least one promoter operably linked to the second nucleotide sequence, wherein the at least one promoter operably linked to the second nucleotide sequence is an F17R promoter; and (iii) a nucleotide sequence comprising at least one promoter operably linked to the third nucleotide sequence, wherein the at least one promoter operably linked to the third nucleotide sequence is a E3L promoter. In specific embodiments, the nucleotide sequence of the pS promoter comprises the nucleotide sequence of SEQ ID NO: 555, SEQ ID NO: 556, or SEQ ID NO: 557. In specific embodiments, the nucleotide sequence of the F17R promoter comprises the nucleotide sequence of SEQ ID NO: 563. In specific embodiments, the nucleotide sequence of the E3L promoter comprises the nucleotide sequence of SEQ ID NO: 567.

[0481] In some embodiments of the various embodiments and aspects described herein wherein the nucleic acid comprises the first transgene, the first transgene is inserted between the partial C2L and F3L vaccinia genes. In another embodiment, the first transgene is inserted adjacent to the partial vaccinia C2L gene. In another embodiment, the first transgene is inserted adjacent to the partial vaccinia F3L gene. In another embodiment, the first transgene is inserted between vaccinia genes C3L and F4L. In other embodiments of the various embodiments and aspects described herein wherein the nucleic acid comprises the first transgene, the first transgene is inserted into the locus of the deletion in the B8R gene. In other embodiments of the various embodiments and aspects described herein wherein the nucleic acid comprises the first transgene, the first transgene is inserted between the partial B14R and B29R vaccinia genes. In another embodiment, the first transgene is inserted adjacent to the partial vaccinia B14R gene. In another embodiment, the first transgene is inserted adjacent to the partial vaccinia B29R gene. In particular embodiments wherein the B14R to B29R genes are deleted, the first transgene is inserted adjacent to the B13R gene.

[0482] In some embodiments of the various embodiments and aspects described herein wherein the nucleic acid comprises the second transgene, the second transgene is inserted between the partial C2L and F3L vaccinia genes. In another embodiment, the second transgene is inserted adjacent to the partial vaccinia C2L gene. In another embodiment, the second transgene is inserted adjacent to the partial vaccinia F3L gene. In another embodiment, the second transgene is inserted between vaccinia genes C3L and F4L. In other embodiments of the various embodiments and aspects described herein wherein the nucleic acid comprises the second transgene, the second transgene is inserted into the locus of the deletion in the B8R gene. In other embodiments of the various embodiments and aspects described herein wherein the nucleic acid comprises the second transgene, the second transgene is inserted between the partial B14R and B29R vaccinia genes. In another embodiment, the second transgene is inserted adjacent to the partial vaccinia B14R gene. In another embodiment, the second transgene is inserted adjacent to the partial vaccinia B29R gene. In particular embodiments wherein the B14R to B29R genes are deleted, the second transgene is inserted adjacent to the B13R gene.

[0483] In some embodiments of the various embodiments and aspects described herein wherein the nucleic acid comprises the third transgene, the third transgene is inserted between the partial C2L and F3L vaccinia genes. In another embodiment, the third transgene is inserted adjacent to the partial vaccinia C2L gene. In another embodiment, the third transgene is inserted adjacent to the partial vaccinia F3L gene. In another embodiment, the third transgene is inserted between vaccinia genes C3L and F4L. In other embodiments of the various embodiments and aspects described herein wherein the nucleic acid comprises the third transgene, the third transgene is inserted into the locus of the deletion in the B8R gene. In other embodiments of the various embodiments and aspects described herein wherein the nucleic acid comprises the third transgene, the third transgene is inserted between the partial B14R and B29R vaccinia genes. In another embodiment, the third transgene is inserted adjacent to the partial vaccinia B14R gene. In another embodiment, the third transgene is inserted adjacent to the partial vaccinia B29R gene. In particular embodiments wherein the B14R to B29R genes are deleted, the third transgene is inserted adjacent to the B13R gene.

[0484] In some embodiments of the various embodiments and aspects described herein wherein the nucleic acid comprises the first transgene and the second transgene, the first transgene and the second transgene are inserted between the partial C2L and F3L vaccinia genes. In another embodiment, the first transgene and the second transgene are inserted adjacent to the partial vaccinia C2L gene. In another embodiment, the first transgene and the second transgene are inserted adjacent to the partial vaccinia F3L gene. In another embodiment, the first transgene and the second transgene are inserted between vaccinia genes C3L and F4L. In other embodiments of the various embodiments and aspects described herein wherein the nucleic acid comprises the first transgene and the second transgene, the first transgene and the second transgene are inserted into the locus of the deletion in the B8R gene. In other embodiments of the various embodiments and aspects described herein wherein the nucleic acid comprises the first transgene and the second transgene, the first transgene and the second transgene are inserted between the partial B14R and B29R vaccinia genes. In another embodiment, the first transgene and the second transgene are inserted adjacent to the partial vaccinia B14R gene. In another embodiment, the first transgene and the second transgene are inserted adjacent to the partial vaccinia B29R gene. In particular embodiments wherein the B14R to B29R genes are deleted, the first transgene and the second transgene are inserted adjacent to the B13R gene.

[0485] In some embodiments of the various embodiments and aspects described herein wherein the nucleic acid comprises the first transgene and the third transgene, the first transgene and the third transgene are inserted between the partial C2L and F3L vaccinia genes. In another embodiment, the first transgene and the third transgene are inserted adjacent to the partial vaccinia C2L gene. In another embodiment, the first transgene and the third transgene are inserted adjacent to the partial vaccinia F3L gene. In another embodiment, the first transgene and the third transgene are inserted between vaccinia genes C3L and F4L. In other embodiments of the various embodiments and aspects described herein wherein the nucleic acid comprises the first transgene and the third transgene, the first transgene and the third transgene are inserted into the locus of the deletion in the B8R gene. In other embodiments of the various embodiments and aspects described herein wherein the nucleic acid comprises the first transgene and the third transgene, the first transgene and the third transgene are inserted between the partial B14R and B29R vaccinia genes. In another embodiment, the first transgene and the third transgene are inserted adjacent to the partial vaccinia B14R gene. In another embodiment, the first transgene and the third transgene are inserted adjacent to the partial vaccinia B29R gene. In particular embodiments wherein the B14R to B29R genes are deleted, the first transgene and the third transgene are inserted adjacent to the B13R gene.

[0486] In some embodiments of the various embodiments and aspects described herein wherein the nucleic acid comprises the second transgene and the third transgene, the second transgene and the third transgene are inserted between the partial C2L and F3L vaccinia genes. In another embodiment, the second transgene and the third transgene are inserted adjacent to the partial vaccinia C2L gene. In another embodiment, the second transgene and the third transgene are inserted adjacent to the partial vaccinia F3L gene. In another embodiment, the second transgene and the third transgene are inserted between vaccinia genes C3L and F4L. In other embodiments of the various embodiments and aspects described herein wherein the nucleic acid comprises the second transgene and the third transgene, the second transgene and the third transgene are inserted into the locus of the deletion in the B8R gene. In other embodiments of the various embodiments and aspects described herein wherein the nucleic acid comprises the second transgene and the third transgene, the second transgene and the third transgene are inserted between the partial B14R and B29R vaccinia genes. In another embodiment, the second transgene and the third transgene are inserted adjacent to the partial vaccinia B14R gene. In another embodiment, the second transgene and the third transgene are inserted adjacent to the partial vaccinia B29R gene. In particular embodiments wherein the B14R to B29R genes are deleted, the second transgene and the third transgene are inserted adjacent to the B13R gene.

[0487] In some embodiments of the various embodiments and aspects described herein wherein the nucleic acid comprises the first transgene and the second transgene, the first transgene is inserted between the partial C2L and F3L vaccinia genes, and the second transgene is inserted into the locus of the deletion in the B8R gene. In another embodiment, the first transgene is inserted adjacent to the partial vaccinia C2L gene, and the second transgene is inserted into the locus of the deletion in the B8R gene. In another embodiment, the first transgene is inserted adjacent to the partial vaccinia F3L gene, and the second transgene is inserted into the locus of the deletion in the B8R gene. In another embodiment, the first transgene is inserted between vaccinia genes C3L and F4L, and the second transgene is inserted into the locus of the deletion in the B8R gene. In other embodiments of the various embodiments and aspects described herein wherein the nucleic acid comprises the first transgene and the second transgene, the second transgene is inserted between the partial C2L and F3L vaccinia genes, and the first transgene is inserted into the locus of the deletion in the B8R gene. In another embodiment, the second transgene is inserted adjacent to the partial vaccinia C2L gene, and the first transgene is inserted into the locus of the deletion in the B8R gene. In another embodiment, the second transgene is inserted adjacent to the partial vaccinia F3L gene, and the first transgene is inserted into the locus of the deletion in the B8R gene. In another embodiment, the second transgene is inserted between vaccinia genes C3L and F4L, and the first transgene is inserted into the locus of the deletion in the B8R gene. In other embodiments of the various embodiments and aspects described herein wherein the nucleic acid comprises the first transgene and the second transgene, the first transgene is inserted between the partial C2L and F3L vaccinia genes, and the second transgene is inserted between the partial B14R and B29R vaccinia genes. In another embodiment, the first transgene is inserted adjacent to the partial vaccinia C2L gene, inserted adjacent to the partial vaccinia F3L gene, or inserted between vaccinia genes C3L and F4L, and the second transgene is inserted adjacent to the partial vaccinia B14R gene, inserted adjacent to the partial vaccinia B29R gene, or, when the B14R to B29R genes are deleted, inserted adjacent to the B13R gene. In other embodiments of the various embodiments and aspects described herein wherein the nucleic acid comprises the first transgene and the second transgene, the second transgene is inserted between the partial C2L and F3L vaccinia genes, and the first transgene is inserted between the partial B14R and B29R vaccinia genes. In another embodiment, the second transgene is inserted adjacent to the partial vaccinia C2L gene, inserted adjacent to the partial vaccinia F3L gene, or inserted between vaccinia genes C3L and F4L, and the first transgene is inserted adjacent to the partial vaccinia B14R gene, inserted adjacent to the partial vaccinia B29R gene, or, when the B14R to B29R genes are deleted, inserted adjacent to the B13R gene. In other embodiments of the various embodiments and aspects described herein wherein the nucleic acid comprises the first transgene and the second transgene, the first transgene is inserted into the locus of the deletion in the B8R gene, and the second transgene is inserted between the partial B14R and B29R vaccinia genes. In another embodiment, the first transgene is inserted into the locus of the deletion in the B8R gene, and the second transgene is inserted adjacent to the partial vaccinia B14R gene. In another embodiment, the first transgene is inserted into the locus of the deletion in the B8R gene, and the second transgene is inserted adjacent to the partial vaccinia B29R gene. In particular embodiments wherein the B14R to B29R genes are deleted, the first transgene is inserted into the locus of the deletion in the B8R gene, and the second transgene is inserted adjacent to the B13R gene. In other embodiments of the various embodiments and aspects described herein wherein the nucleic acid comprises the first transgene and the second transgene, the second transgene is inserted into the locus of the deletion in the B8R gene, and the first transgene is inserted between the partial B14R and B29R vaccinia genes. In another embodiment, the second transgene is inserted into the locus of the deletion in the B8R gene, and the first transgene is inserted adjacent to the partial vaccinia B14R gene. In another embodiment, the second transgene is inserted into the locus of the deletion in the B8R gene, and the first transgene is inserted adjacent to the partial vaccinia B29R gene. In particular embodiments wherein the B14R to B29R genes are deleted, the second transgene is inserted into the locus of the deletion in the B8R gene, and the first transgene is inserted adjacent to the B13R gene.

[0488] In some embodiments of the various embodiments and aspects described herein wherein the nucleic acid comprises the first transgene and the third transgene, the first transgene is inserted between the partial C2L and F3L vaccinia genes, and the third transgene is inserted into the locus of the deletion in the B8R gene. In another embodiment, the first transgene is inserted adjacent to the partial vaccinia C2L gene, and the third transgene is inserted into the locus of the deletion in the B8R gene. In another embodiment, the first transgene is inserted adjacent to the partial vaccinia F3L gene, and the third transgene is inserted into the locus of the deletion in the B8R gene. In another embodiment, the first transgene is inserted between vaccinia genes C3L and F4L, and the third transgene is inserted into the locus of the deletion in the B8R gene. In other embodiments of the various embodiments and aspects described herein wherein the nucleic acid comprises the first transgene and the third transgene, the third transgene is inserted between the partial C2L and F3L vaccinia genes, and the first transgene is inserted into the locus of the deletion in the B8R gene. In another embodiment, the third transgene is inserted adjacent to the partial vaccinia C2L gene, and the first transgene is inserted into the locus of the deletion in the B8R gene. In another embodiment, the third transgene is inserted adjacent to the partial vaccinia F3L gene, and the first transgene is inserted into the locus of the deletion in the B8R gene. In another embodiment, the third transgene is inserted between vaccinia genes C3L and F4L, and the first transgene is inserted into the locus of the deletion in the B8R gene. In other embodiments of the various embodiments and aspects described herein wherein the nucleic acid comprises the first transgene and the third transgene, the first transgene is inserted between the partial C2L and F3L vaccinia genes, and the third transgene is inserted between the partial B14R and B29R vaccinia genes. In another embodiment, the first transgene is inserted adjacent to the partial vaccinia C2L gene, inserted adjacent to the partial vaccinia F3L gene, or inserted between vaccinia genes C3L and F4L, and the third transgene is inserted adjacent to the partial vaccinia B14R gene, inserted adjacent to the partial vaccinia B29R gene, or, when the B14R to B29R genes are deleted, inserted adjacent to the B13R gene. In other embodiments of the various embodiments and aspects described herein wherein the nucleic acid comprises the first transgene and the third transgene, the third transgene is inserted between the partial C2L and F3L vaccinia genes, and the first transgene is inserted between the partial B14R and B29R vaccinia genes. In another embodiment, the third transgene is inserted adjacent to the partial vaccinia C2L gene, inserted adjacent to the partial vaccinia F3L gene, or inserted between vaccinia genes C3L and F4L, and the first transgene is inserted adjacent to the partial vaccinia B14R gene, inserted adjacent to the partial vaccinia B29R gene, or, when the B14R to B29R genes are deleted, inserted adjacent to the B13R gene. In other embodiments of the various embodiments and aspects described herein wherein the nucleic acid comprises the first transgene and the third transgene, the first transgene is inserted into the locus of the deletion in the B8R gene, and the third transgene is inserted between the partial B14R and B29R vaccinia genes. In another embodiment, the first transgene is inserted into the locus of the deletion in the B8R gene, and the third transgene is inserted adjacent to the partial vaccinia B14R gene. In another embodiment, the first transgene is inserted into the locus of the deletion in the B8R gene, and the third transgene is inserted adjacent to the partial vaccinia B29R gene. In particular embodiments wherein the B14R to B29R genes are deleted, the first transgene is inserted into the locus of the deletion in the B8R gene, and the third transgene is inserted adjacent to the B13R gene. In other embodiments of the various embodiments and aspects described herein wherein the nucleic acid comprises the first transgene and the third transgene, the third transgene is inserted into the locus of the deletion in the B8R gene, and the first transgene is inserted between the partial B14R and B29R vaccinia genes. In another embodiment, the third transgene is inserted into the locus of the deletion in the B8R gene, and the first transgene is inserted adjacent to the partial vaccinia B14R gene. In another embodiment, the third transgene is inserted into the locus of the deletion in the B8R gene, and the first transgene is inserted adjacent to the partial vaccinia B29R gene. In particular embodiments wherein the B14R to B29R genes are deleted, the third transgene is inserted into the locus of the deletion in the B8R gene, and the first transgene is inserted adjacent to the B13R gene.

[0489] In some embodiments of the various embodiments and aspects described herein wherein the nucleic acid comprises the second transgene and the third transgene, the second transgene is inserted between the partial C2L and F3L vaccinia genes, and the third transgene is inserted into the locus of the deletion in the B8R gene. In another embodiment, the second transgene is inserted adjacent to the partial vaccinia C2L gene, and the third transgene is inserted into the locus of the deletion in the B8R gene. In another embodiment, the second transgene is inserted adjacent to the partial vaccinia F3L gene, and the third transgene is inserted into the locus of the deletion in the B8R gene. In another embodiment, the second transgene is inserted between vaccinia genes C3L and F4L, and the third transgene is inserted into the locus of the deletion in the B8R gene. In other embodiments of the various embodiments and aspects described herein wherein the nucleic acid comprises the second transgene and the third transgene, the third transgene is inserted between the partial C2L and F3L vaccinia genes, and the second transgene is inserted into the locus of the deletion in the B8R gene. In another embodiment, the third transgene is inserted adjacent to the partial vaccinia C2L gene, and the second transgene is inserted into the locus of the deletion in the B8R gene. In another embodiment, the third transgene is inserted adjacent to the partial vaccinia F3L gene, and the second transgene is inserted into the locus of the deletion in the B8R gene. In another embodiment, the third transgene is inserted between vaccinia genes C3L and F4L, and the second transgene is inserted into the locus of the deletion in the B8R gene. In other embodiments of the various embodiments and aspects described herein wherein the nucleic acid comprises the second transgene and the third transgene, the second transgene is inserted between the partial C2L and F3L vaccinia genes, and the third transgene is inserted between the partial B14R and B29R vaccinia genes. In another embodiment, the second transgene is inserted adjacent to the partial vaccinia C2L gene, inserted adjacent to the partial vaccinia F3L gene, or inserted between vaccinia genes C3L and F4L, and the third transgene is inserted adjacent to the partial vaccinia B14R gene, inserted adjacent to the partial vaccinia B29R gene, or, when the B14R to B29R genes are deleted, inserted adjacent to the B13R gene. In other embodiments of the various embodiments and aspects described herein wherein the nucleic acid comprises the second transgene and the third transgene, the third transgene is inserted between the partial C2L and F3L vaccinia genes, and the second transgene is inserted between the partial B14R and B29R vaccinia genes. In another embodiment, the third transgene is inserted adjacent to the partial vaccinia C2L gene, inserted adjacent to the partial vaccinia F3L gene, or inserted between vaccinia genes C3L and F4L, and the second transgene is inserted adjacent to the partial vaccinia B14R gene, inserted adjacent to the partial vaccinia B29R gene, or, when the B14R to B29R genes are deleted, inserted adjacent to the B13R gene. In other embodiments of the various embodiments and aspects described herein wherein the nucleic acid comprises the second transgene and the third transgene, the second transgene is inserted into the locus of the deletion in the B8R gene, and the third transgene is inserted between the partial B14R and B29R vaccinia genes. In another embodiment, the second transgene is inserted into the locus of the deletion in the B8R gene, and the third transgene is inserted adjacent to the partial vaccinia B14R gene. In another embodiment, the second transgene is inserted into the locus of the deletion in the B8R gene, and the third transgene is inserted adjacent to the partial vaccinia B29R gene. In particular embodiments wherein the B14R to B29R genes are deleted, the second transgene is inserted into the locus of the deletion in the B8R gene, and the third transgene is inserted adjacent to the B13R gene. In other embodiments of the various embodiments and aspects described herein wherein the nucleic acid comprises the second transgene and the third transgene, the third transgene is inserted into the locus of the deletion in the B8R gene, and the second transgene is inserted between the partial B14R and B29R vaccinia genes. In another embodiment, the third transgene is inserted into the locus of the deletion in the B8R gene, and the second transgene is inserted adjacent to the partial vaccinia B14R gene. In another embodiment, the third transgene is inserted into the locus of the deletion in the B8R gene, and the second transgene is inserted adjacent to the partial vaccinia B29R gene. In particular embodiments wherein the B14R to B29R genes are deleted, the third transgene is inserted into the locus of the deletion in the B8R gene, and the second transgene is inserted adjacent to the B13R gene.

[0490] In some embodiments of the various embodiments and aspects described herein wherein the nucleic acid comprises the first transgene, the second transgene and the third transgene, the first transgene, the second transgene, and the third transgene are inserted between the partial C2L and F3L vaccinia genes. In another embodiment, the first transgene, the second transgene, and the third transgene are inserted adjacent to the partial vaccinia C2L gene. In another embodiment, the first transgene, the second transgene, and the third transgene are inserted adjacent to the partial vaccinia F3L gene. In another embodiment, the first transgene, the second transgene, and the third transgene are inserted between vaccinia genes C3L and F4L. In other embodiments of the various embodiments and aspects described herein wherein the nucleic acid comprises the first transgene, the second transgene and the third transgene, the first transgene, the second transgene, and the third transgene are inserted into the locus of the deletion in the B8R gene. In other embodiments of the various embodiments and aspects described herein wherein the nucleic acid comprises the first transgene, the second transgene and the third transgene, the first transgene, the second transgene, and the third transgene are inserted between the partial B14R and B29R vaccinia genes. In another embodiment, the first transgene, the second transgene, and the third transgene are inserted adjacent to the partial vaccinia B14R gene. In another embodiment, the first transgene, the second transgene, and the third transgene are inserted adjacent to the partial vaccinia B29R gene. In particular embodiments wherein the B14R to B29R genes are deleted, the first transgene, the second transgene, and the third transgene are inserted adjacent to the B13R gene.

[0491] In other embodiments of the various embodiments and aspects described herein wherein the nucleic acid comprises the first transgene, the second transgene and the third transgene, the first transgene is inserted between the partial C2L and F3L vaccinia genes, and the second transgene and the third transgene are inserted into the locus of the deletion in the B8R gene. In another embodiment, the first transgene is inserted adjacent to the partial vaccinia C2L gene, and the second transgene and the third transgene are inserted into the locus of the deletion in the B8R gene. In another embodiment, the first transgene is inserted adjacent to the partial vaccinia F3L gene, and the second transgene and the third transgene are inserted into the locus of the deletion in the B8R gene. In another embodiment, the first transgene is inserted between vaccinia genes C3L and F4L, and the second transgene and the third transgene are inserted into the locus of the deletion in the B8R gene. In other embodiments of the various embodiments and aspects described herein wherein the nucleic acid comprises the first transgene, the second transgene and the third transgene, the second transgene is inserted between the partial C2L and F3L vaccinia genes, and the first transgene and the third transgene are inserted into the locus of the deletion in the B8R gene. In another embodiment, the second transgene is inserted adjacent to the partial vaccinia C2L gene, and the first transgene and the third transgene are inserted into the locus of the deletion in the B8R gene. In another embodiment, the second transgene is inserted adjacent to the partial vaccinia F3L gene, and the first transgene and the third transgene are inserted into the locus of the deletion in the B8R gene. In another embodiment, the second transgene is inserted between vaccinia genes C3L and F4L, and the first transgene and the third transgene are inserted into the locus of the deletion in the B8R gene. In other embodiments of the various embodiments and aspects described herein wherein the nucleic acid comprises the first transgene, the second transgene and the third transgene, the third transgene is inserted between the partial C2L and F3L vaccinia genes, and the first transgene and the second transgene are inserted into the locus of the deletion in the B8R gene. In another embodiment, the third transgene is inserted adjacent to the partial vaccinia C2L gene, and the first transgene and the second transgene are inserted into the locus of the deletion in the B8R gene. In another embodiment, the third transgene is inserted adjacent to the partial vaccinia F3L gene, and the first transgene and the second transgene are inserted into the locus of the deletion in the B8R gene. In another embodiment, the third transgene is inserted between vaccinia genes C3L and F4L, and the first transgene and the second transgene are inserted into the locus of the deletion in the B8R gene. In other embodiments of the various embodiments and aspects described herein wherein the nucleic acid comprises the first transgene, the second transgene and the third transgene, the first transgene and the second transgene are inserted between the partial C2L and F3L vaccinia genes, and the third transgene is inserted into the locus of the deletion in the B8R gene. In another embodiment, the first transgene and the second transgene are inserted adjacent to the partial vaccinia C2L gene, and the third transgene is inserted into the locus of the deletion in the B8R gene. In another embodiment, the first transgene and the second transgene are inserted adjacent to the partial vaccinia F3L gene, and the third transgene is inserted into the locus of the deletion in the B8R gene. In another embodiment, the first transgene and the second transgene are inserted between vaccinia genes C3L and F4L, and the third transgene is inserted into the locus of the deletion in the B8R gene. In other embodiments of the various embodiments and aspects described herein wherein the nucleic acid comprises the first transgene, the second transgene and the third transgene, the first transgene and the third transgene are inserted between the partial C2L and F3L vaccinia genes, and the second transgene is inserted into the locus of the deletion in the B8R gene. In another embodiment, the first transgene and the third transgene are inserted adjacent to the partial vaccinia C2L gene, and the second transgene is inserted into the locus of the deletion in the B8R gene. In another embodiment, the first transgene and the third transgene are inserted adjacent to the partial vaccinia F3L gene, and the second transgene is inserted into the locus of the deletion in the B8R gene. In another embodiment, the first transgene and the third transgene are inserted between vaccinia genes C3L and F4L, and the second transgene is inserted into the locus of the deletion in the B8R gene. In other embodiments of the various embodiments and aspects described herein wherein the nucleic acid comprises the first transgene, the second transgene and the third transgene, the second transgene and the third transgene are inserted between the partial C2L and F3L vaccinia genes, and the first transgene is inserted into the locus of the deletion in the B8R gene. In another embodiment, the second transgene and the third transgene are is inserted adjacent to the partial vaccinia C2L gene, and the first transgene is inserted into the locus of the deletion in the B8R gene. In another embodiment, the second transgene and the third transgene are inserted adjacent to the partial vaccinia F3L gene, and the first transgene is inserted into the locus of the deletion in the B8R gene. In another embodiment, the second transgene and the third transgene are inserted between vaccinia genes C3L and F4L, and the first transgene is inserted into the locus of the deletion in the B8R gene. In other embodiments of the various embodiments and aspects described herein wherein the nucleic acid comprises the first transgene, the second transgene and the third transgene, the first transgene is inserted within between the partial C2L and F3L vaccinia genes, and the second transgene and the third transgene are inserted between the partial B14R and B29R vaccinia genes. In another embodiment, the first transgene is inserted adjacent to the partial vaccinia C2L gene, inserted adjacent to the partial vaccinia F3L gene, or inserted between vaccinia genes C3L and F4L; and the second transgene and the third transgene are inserted adjacent to the partial vaccinia B14R gene, inserted adjacent to the partial vaccinia B29R gene, or, when the B14R to B29R genes are deleted, inserted adjacent to the B13R gene. In other embodiments of the various embodiments and aspects described herein wherein the nucleic acid comprises the first transgene, the second transgene and the third transgene, the second transgene is inserted between the partial C2L and F3L vaccinia genes, and the first transgene and the third transgene are inserted between the partial B14R and B29R vaccinia genes. In another embodiment, the second transgene is inserted adjacent to the partial vaccinia C2L gene, inserted adjacent to the partial vaccinia F3L gene, or inserted between vaccinia genes C3L and F4L; and the first transgene and the third transgene are inserted adjacent to the partial vaccinia B14R gene, inserted adjacent to the partial vaccinia B29R gene, or, when the B14R to B29R genes are deleted, inserted adjacent to the B13R gene. In other embodiments of the various embodiments and aspects described herein wherein the nucleic acid comprises the first transgene, the second transgene and the third transgene, the third transgene is inserted between the partial C2L and F3L vaccinia genes, and the first transgene and the second transgene are inserted between the partial B14R and B29R vaccinia genes. In another embodiment, the third transgene is inserted adjacent to the partial vaccinia C2L gene, inserted adjacent to the partial vaccinia F3L gene, or inserted between vaccinia genes C3L and F4L; and the first transgene and the second transgene are inserted adjacent to the partial vaccinia B14R gene, inserted adjacent to the partial vaccinia B29R gene, or, when the B14R to B29R genes are deleted, inserted adjacent to the B13R gene. In other embodiments of the various embodiments and aspects described herein wherein the nucleic acid comprises the first transgene, the second transgene and the third transgene, the first transgene and the second transgene are inserted between the partial C2L and F3L vaccinia genes, and the third transgene is inserted between the partial B14R and B29R vaccinia genes. In another embodiment, the first transgene and the second transgene are inserted adjacent to the partial vaccinia C2L gene, inserted adjacent to the partial vaccinia F3L gene, or inserted between vaccinia genes C3L and F4L; and the third transgene is inserted adjacent to the partial vaccinia B14R gene, inserted adjacent to the partial vaccinia B29R gene, or, when the B14R to B29R genes are deleted, inserted adjacent to the B13R gene. In other embodiments of the various embodiments and aspects described herein wherein the nucleic acid comprises the first transgene, the second transgene and the third transgene, the first transgene and the third transgene are inserted between the partial C2L and F3L vaccinia genes, and the second transgene is inserted between the partial B14R and B29R vaccinia genes. In another embodiment, the first transgene and the third transgene are inserted adjacent to the partial vaccinia C2L gene, inserted adjacent to the partial vaccinia F3L gene, or inserted between vaccinia genes C3L and F4L; and the second transgene is inserted adjacent to the partial vaccinia B14R gene, inserted adjacent to the partial vaccinia B29R gene, or, when the B14R to B29R genes are deleted, inserted adjacent to the B13R gene. In other embodiments of the various embodiments and aspects described herein wherein the nucleic acid comprises the first transgene, the second transgene and the third transgene, the second transgene and the third transgene are inserted between the partial C2L and F3L vaccinia genes, and the first transgene is inserted between the partial B14R and B29R vaccinia genes. In another embodiment, the second transgene and the third transgene are inserted adjacent to the partial vaccinia C2L gene, inserted adjacent to the partial vaccinia F3L gene, or inserted between vaccinia genes C3L and F4L; and the first transgene is inserted adjacent to the partial vaccinia B14R gene, inserted adjacent to the partial vaccinia B29R gene, or, when the B14R to B29R genes are deleted, inserted adjacent to the B13R gene. In other embodiments of the various embodiments and aspects described herein wherein the nucleic acid comprises the first transgene, the second transgene and the third transgene, the first transgene is inserted into the locus of the deletion in the B8R gene, and the second transgene and the third transgene are inserted between the partial B14R and B29R vaccinia genes. In another embodiment, the first transgene is inserted into the locus of the deletion in the B8R gene, and the second transgene and the third transgene are inserted adjacent to the partial vaccinia B14R gene. In another embodiment, the first transgene is inserted into the locus of the deletion in the B8R gene, and the second transgene and the third transgene are inserted adjacent to the partial vaccinia B29R gene. In particular embodiments wherein the B14R to B29R genes are deleted, the first transgene is inserted into the locus of the deletion in the B8R gene, and the second transgene and the third transgene are inserted adjacent to the B13R gene. In other embodiments of the various embodiments and aspects described herein wherein the nucleic acid comprises the first transgene, the second transgene and the third transgene, the second transgene is inserted into the locus of the deletion in the B8R gene, and the first transgene and the third transgene are inserted between the partial B14R and B29R vaccinia genes. In another embodiment, the second transgene is inserted into the locus of the deletion in the B8R gene, and the first transgene and the third transgene are inserted adjacent to the partial vaccinia B14R gene. In another embodiment, the second transgene is inserted into the locus of the deletion in the B8R gene, and the first transgene and the third transgene are inserted adjacent to the partial vaccinia B29R gene. In particular embodiments wherein the B14R to B29R genes are deleted, the second transgene is inserted into the locus of the deletion in the B8R gene, and the first transgene and the third transgene are inserted adjacent to the B13R gene. In other embodiments of the various embodiments and aspects described herein wherein the nucleic acid comprises the first transgene, the second transgene and the third transgene, the third transgene is inserted into the locus of the deletion in the B8R gene, and the first transgene and the second transgene are inserted between the partial B14R and B29R vaccinia genes. In another embodiment, the third transgene is inserted into the locus of the deletion in the B8R gene, and the first transgene and the second transgene are inserted adjacent to the partial vaccinia B14R gene. In another embodiment, the third transgene is inserted into the locus of the deletion in the B8R gene, and the first transgene and the second transgene are inserted adjacent to the partial vaccinia B29R gene. In particular embodiments wherein the B14R to B29R genes are deleted, the third transgene is inserted into the locus of the deletion in the B8R gene, and the first transgene and the second transgene are inserted adjacent to the B13R gene. In other embodiments of the various embodiments and aspects described herein wherein the nucleic acid comprises the first transgene, the second transgene and the third transgene, the first transgene and the second transgene are inserted into the locus of the deletion in the B8R gene, and the third transgene is inserted between the partial B14R and B29R vaccinia genes. In another embodiment, the first transgene and the second transgene are inserted into the locus of the deletion in the B8R gene, and the third transgene is inserted adjacent to the partial vaccinia B14R gene. In another embodiment, the first transgene and the second transgene are inserted into the locus of the deletion in the B8R gene, and the third transgene is inserted adjacent to the partial vaccinia B29R gene. In particular embodiments wherein the B14R to B29R genes are deleted, the first transgene and the second transgene are inserted into the locus of the deletion in the B8R gene, and the third transgene is inserted adjacent to the B13R gene. In other embodiments of the various embodiments and aspects described herein wherein the nucleic acid comprises the first transgene, the second transgene and the third transgene, the first transgene and the third transgene are inserted into the locus of the deletion in the B8R gene, and the second transgene is inserted between the partial B14R and B29R vaccinia genes. In another embodiment, the first transgene and the third transgene are inserted into the locus of the deletion in the B8R gene, and the second transgene is inserted adjacent to the partial vaccinia B14R gene. In another embodiment, the first transgene and the third transgene are inserted into the locus of the deletion in the B8R gene, and the second transgene is inserted adjacent to the partial vaccinia B29R gene. In particular embodiments wherein the B14R to B29R genes are deleted, the first transgene and the third transgene are inserted into the locus of the deletion in the B8R gene, and the second transgene is inserted adjacent to the B13R gene. In other embodiments of the various embodiments and aspects described herein wherein the nucleic acid comprises the first transgene, the second transgene and the third transgene, the second transgene and the third transgene are inserted into the locus of the deletion in the B8R gene, and the first transgene is inserted between the partial B14R and B29R vaccinia genes. In another embodiment, the second transgene and the third transgene are inserted into the locus of the deletion in the B8R gene, and the first transgene is inserted adjacent to the partial vaccinia B14R gene. In another embodiment, the second transgene and the third transgene are inserted into the locus of the deletion in the B8R gene, and the first transgene is inserted adjacent to the partial vaccinia B29R gene. In particular embodiments wherein the B14R to B29R genes are deleted, the second transgene and the third transgene are inserted into the locus of the deletion in the B8R gene, and the first transgene is inserted adjacent to the B13R gene.

[0492] In other embodiments of the various embodiments and aspects described herein wherein the nucleic acid comprises the first transgene, the second transgene and the third transgene, the first transgene is inserted between the partial C2L and F3L vaccinia genes, the second transgene is inserted into the locus of the deletion in the B8R gene, and the third transgene is inserted between the partial B14R and B29R vaccinia genes. In another embodiment, the first transgene is inserted adjacent to the partial vaccinia C2L gene, inserted adjacent to the partial vaccinia F3L gene, or inserted between vaccinia genes C3L and F4L, the second transgene is inserted into the locus of the deletion in the B8R gene, and the third transgene is inserted adjacent to the partial vaccinia B14R gene, inserted adjacent to the partial vaccinia B29R gene, or, when the B14R to B29R genes are deleted, inserted adjacent to the B13R gene. In other embodiments of the various embodiments and aspects described herein wherein the nucleic acid comprises the first transgene, the second transgene and the third transgene, the first transgene is inserted between the partial C2L and F3L vaccinia genes, the third transgene is inserted into the locus of the deletion in the B8R gene, and the second transgene is inserted between the partial B14R and B29R vaccinia genes. In another embodiment, the first transgene is inserted adjacent to the partial vaccinia C2L gene, inserted adjacent to the partial vaccinia F3L gene, or inserted between vaccinia genes C3L and F4L, the third transgene is inserted into the locus of the deletion in the B8R gene, and the second transgene is inserted adjacent to the partial vaccinia B14R gene, inserted adjacent to the partial vaccinia B29R gene, or, when the B14R to B29R genes are deleted, inserted adjacent to the B13R gene. In other embodiments of the various embodiments and aspects described herein wherein the nucleic acid comprises the first transgene, the second transgene and the third transgene, the second transgene is inserted between the partial C2L and F3L vaccinia genes, the first transgene is inserted into the locus of the deletion in the B8R gene, and the third transgene is inserted between the partial B14R and B29R vaccinia genes. In another embodiment, the second transgene is inserted adjacent to the partial vaccinia C2L gene, inserted adjacent to the partial vaccinia F3L gene, or inserted between vaccinia genes C3L and F4L, the first transgene is inserted into the locus of the deletion in the B8R gene, and the third transgene is inserted adjacent to the partial vaccinia B14R gene, inserted adjacent to the partial vaccinia B29R gene, or, when the B14R to B29R genes are deleted, inserted adjacent to the B13R gene. In other embodiments of the various embodiments and aspects described herein wherein the nucleic acid comprises the first transgene, the second transgene and the third transgene, the second transgene is inserted between the partial C2L and F3L vaccinia genes, the third transgene is inserted into the locus of the deletion in the B8R gene, and the first transgene is inserted between the partial B14R and B29R vaccinia genes. In another embodiment, the second transgene is inserted adjacent to the partial vaccinia C2L gene, inserted adjacent to the partial vaccinia F3L gene, or inserted between vaccinia genes C3L and F4L, the third transgene is inserted into the locus of the deletion in the B8R gene, and the first transgene is inserted adjacent to the partial vaccinia B14R gene, inserted adjacent to the partial vaccinia B29R gene, or, when the B14R to B29R genes are deleted, inserted adjacent to the B13R gene. In other embodiments of the various embodiments and aspects described herein wherein the nucleic acid comprises the first transgene, the second transgene and the third transgene, the third transgene is inserted between the partial C2L and F3L vaccinia genes, the first transgene is inserted into the locus of the deletion in the B8R gene, and the second transgene is inserted between the partial B14R and B29R vaccinia genes. In another embodiment, the third transgene is inserted adjacent to the partial vaccinia C2L gene, inserted adjacent to the partial vaccinia F3L gene, or inserted between vaccinia genes C3L and F4L, the first transgene is inserted into the locus of the deletion in the B8R gene, and the second transgene is inserted adjacent to the partial vaccinia B14R gene, inserted adjacent to the partial vaccinia B29R gene, or, when the B14R to B29R genes are deleted, inserted adjacent to the B13R gene. In other embodiments of the various embodiments and aspects described herein wherein the nucleic acid comprises the first transgene, the second transgene and the third transgene, the third transgene is inserted between the partial C2L and F3L vaccinia genes, the second transgene is inserted into the locus of the deletion in the B8R gene, and the first transgene is inserted between the partial B14R and B29R vaccinia genes. In another embodiment, the third transgene is inserted adjacent to the partial vaccinia C2L gene, inserted adjacent to the partial vaccinia F3L gene, or inserted between vaccinia genes C3L and F4L, the second transgene is inserted into the locus of the deletion in the B8R gene, and the first transgene is inserted adjacent to the partial vaccinia B14R gene, inserted adjacent to the partial vaccinia B29R gene, or, when the B14R to B29R genes are deleted, inserted adjacent to the B13R gene.

[0493] In various embodiments and aspects described herein wherein the nucleic acid comprises the nucleotide sequence of SEQ ID NO: 210, the partial C2L and F3L vaccinia genes are partial C2L and F3L vaccinia genes in SEQ ID NO: 210. In various embodiments and aspects described herein wherein the nucleic acid comprises the nucleotide sequence of SEQ ID NO: 210, the partial B14R and B29R vaccinia genes are partial B14R and B29R vaccinia genes in SEQ ID NO: 210.

[0494] In various embodiments and aspects described herein wherein the nucleic acid comprises the nucleotide sequence of SEQ ID NO: 624, the partial C2L and F3L vaccinia genes are partial C2L and F3L vaccinia genes in SEQ ID NO: 624. In various embodiments and aspects described herein wherein the nucleic acid comprises the nucleotide sequence of SEQ ID NO: 624, the partial B14R and B29R vaccinia genes are partial B14R and B29R vaccinia genes in SEQ ID NO: 624.

[0495] In a specific embodiment of the various embodiments and aspects described herein, insertion into the partial C2L and F3L vaccinia genes is insertion within the boundaries of a 5p deletion present in the recombinant vaccinia virus genome. In a specific embodiment of the various embodiments and aspects described herein, insertion between the partial B14R and B29R vaccinia genes is insertion within the boundaries of a 3p deletion present in the recombinant vaccinia virus genome.

[0496] In some embodiments of the various embodiments and aspects described herein, the anti-CTLA-4 antibody or antigen-binding fragment thereof encoded by the first nucleotide sequence is a full-length antibody (for example, a full-length human antibody, a full-length humanized antibody, or a full-length mouse antibody). In a specific embodiment, the first nucleotide sequence encodes a polypeptide that comprises the heavy chain and light chains of ipilimumab linked by a cleavage peptide, for example, a self-cleavage peptide, such as a 2A self-cleaving peptide (e.g., a T2A peptide). In another specific embodiment, the first nucleotide sequence encodes a polypeptide that comprises the heavy chain signal peptide and heavy chain, and light chain signal peptide and light chain of ipilimumab, linked by a cleavage peptide, for example, a self-cleavage peptide, such as a 2A self-cleaving peptide (e.g., a T2A peptide). In other embodiments of the various embodiments and aspects described herein, the anti-CTLA-4 antibody or antigen-binding fragment thereof encoded by the first nucleotide sequence is a single chain antibody (for example, a single chain human antibody, single chain humanized antibody, or a single chain mouse antibody, such as, for example, 9D9).

[0497] In a specific embodiment of the various embodiments and aspects described herein, the at least one promoter operably linked to the first nucleotide sequence encoding the anti-CTLA-4 antibody or antigen-binding fragment thereof is a B8R promoter. In another specific embodiment of the various embodiments and aspects described herein, the at least one promoter operably linked to the first nucleotide sequence encoding the anti-CTLA-4 antibody or antigen-binding fragment thereof is an H5R promoter. In a particular embodiment, the B8R promoter comprises the nucleotide sequence of SEQ ID NO: 564.

[0498] In some embodiments of the various embodiments and aspects described herein, the IL-12 peptide encoded by the second nucleotide sequence is a membrane-bound version of the cytokine. In specific embodiments, the IL-12 polypeptide comprises IL-12 p35 (e.g., human IL-12 p35) and a transmembrane domain. In a specific embodiment, the IL-12 polypeptide consists of IL-12 p35 (e.g., human IL-12 p35) and a transmembrane domain (IL12-TMp35). In specific embodiments, the IL-12 polypeptide comprises IL-12 p35 (e.g., human IL-12 p35), a transmembrane domain and a cytoplasmic domain. In a specific embodiment, the IL-12 polypeptide consists of IL-12 p35 (e.g., human IL-12 p35), a transmembrane domain and a cytoplasmic domain. The transmembrane domain can be derived from any membrane-bound protein (e.g., B7-1, membrane-bound TNFα, or membrane-bound FLT3L). The cytoplasmic domain can be derived from any protein that contains a cytoplasmic domain (e.g., B7-1, TNFα, or FLT3L). In a specific embodiment, the IL-12 polypeptide comprises IL-12 p35 (e.g., human IL-12 p35) and a B7 cytoplasmic and membrane domain from the B7-1 antigen, a commonly used element for mammalian surface display. In a specific embodiment, the IL-12 polypeptide consists of IL-12 p35 (e.g., human IL-12 p35) and a B7 cytoplasmic and membrane domain from the B7-1 antigen. In specific embodiments, the IL-12 polypeptide comprises IL-12 p70 (e.g., human IL-12 p70), which comprises a p40 subunit (e.g., human IL-12 p40) and a p35 subunit (e.g., human IL-12 p35), and a transmembrane domain. In a specific embodiment, the IL-12 polypeptide consists of IL-12 p70 (e.g., human IL-12 p70), which comprises a p40 subunit (e.g., human IL-12 p40) and a p35 subunit (e.g., human IL-12 p35), and a transmembrane domain (IL12-TMp70, or p40-p35-TM). In specific embodiments, the IL-12 polypeptide comprises IL-12 p70 (e.g., human IL-12 p70), which comprises a p40 subunit (e.g., human IL-12 p40) and a p35 subunit (e.g., human IL-12 p35), and a transmembrane domain and a cytoplasmic domain. In a specific embodiment, the IL-12 polypeptide comprises IL-12 p70 (e.g., human IL-12 p70), which comprises a p40 subunit (e.g., human IL-12 p40) and a p35 subunit (e.g., human IL-12 p35), and a transmembrane domain and a cytoplasmic domain. The transmembrane domain can be derived from any membrane-bound protein (e.g., B7-1, membrane-bound TNFα, or membrane-bound FLT3L). The cytoplasmic domain can be derived from any protein that contains a cytoplasmic domain (e.g., B7-1, TNFα, or FLT3L). In a specific embodiment, the IL-12 polypeptide comprises IL-12 p70 (e.g., human IL-12 p70), which comprises a p40 subunit (e.g., human IL-12 p40) and a p35 subunit (e.g., human IL-12 p35), and a B7 cytoplasmic and membrane domain from the B7-1 antigen. In a specific embodiment, the IL-12 polypeptide consists of IL-12 p70 (e.g., human IL-12 p70), which comprises a p40 subunit (e.g., human IL-12 p40) and a p35 subunit (e.g., human IL-12 p35), and a B7 cytoplasmic and membrane domain from the B7-1 antigen. In certain embodiments, the IL-12 polypeptide is a human IL-12 polypeptide (for example, human IL12-TMp35 or human IL12-TMp70). In certain embodiments, the IL-12 polypeptide is a mouse IL-12 polypeptide (for example, mouse IL12-TMp35 or mouse IL12-TMp70).

[0499] In a specific embodiment of the various embodiments and aspects described herein, the at least one promoter operably linked to the second nucleotide sequence encoding the IL-12 polypeptide is a late promoter having the nucleotide sequence of SEQ ID NO: 561. In a specific embodiment of the various embodiments and aspects described herein, the at least one promoter operably linked to the second nucleotide sequence encoding the IL-12 polypeptide is a B8R promoter. In a specific embodiment of the various embodiments and aspects described herein, the at least one promoter operably linked to the second nucleotide sequence encoding the IL-12 polypeptide is a late promoter having the nucleotide sequence of SEQ ID NO: 561 and a B8R promoter. In a particular embodiment, the B8R promoter comprises the nucleotide sequence of SEQ ID NO: 564.

[0500] In specific embodiments, the FLT3L encoded by the third nucleotide sequence is a soluble form of FLT3L. In particular embodiments, the FLT3L encoded by the third nucleotide sequence is a soluble form of human FLT3L. In certain embodiments, the FLT3L encoded by the third nucleotide sequence is a soluble form of the human FLT3L set forth in GenBank Accession No. U03858.1. For example, in specific embodiments, the FLT3L encoded by the third nucleotide sequence lacks the entire FLT3L transmembrane (e.g., the transmembrane domain of the human FLT3L set forth in GenBank Accession No. U03858.1). In other examples, the FLT3L encoded by the third nucleotide sequence lacks at least 80%, at least 85%, at least 90%, or at least 95% of the FLT3L transmembrane domain (e.g., the transmembrane domain of the human FLT3L set forth in GenBank Accession No. U03858.1). In one embodiment, the FLT3L encoded by the third nucleotide sequence lacks the entire FLT3L transmembrane domain and the entire FLT3L cytoplasmic domain. In another embodiment, the FLT3L encoded by the third nucleotide sequence lacks at least 80%, at least 85%, at least 90%, or at least 95% of the FLT3L transmembrane domain and the entire FLT3L cytoplasmic domain. In another embodiment, the FLT3L encoded by the third nucleotide sequence lacks at least 80%, at least 85%, at least 90%, or at least 95% of the FLT3L transmembrane domain and at least 25%, at least 30%, at least 40%, at least 50%, at least 60%, at least 70%, at least 80%, at least 85%, at least 90%, or at least 95% of the FLT3L cytoplasmic domain. In another embodiment, the FLT3L encoded by the third nucleotide sequence lacks the entire FLT3L transmembrane domain and 5, 6, 7, 8, 9, 10, 12, 13, 14, or 15 of the N-terminal amino acid residues of the FLT3L cytoplasmic domain. In another embodiment, the FLT3L encoded by the third nucleotide sequence lacks the entire FLT3L transmembrane domain and 1, 2, 3, or 4 of the N-terminal amino acid residues of the FLT3L cytoplasmic domain. In certain of the embodiments and aspects, the transmembrane and cytoplasmic domains are of the FLT3L sequence set forth in GenBank Accession No. U03858.1.

[0501] In another embodiment, the FLT3L encoded by the third nucleotide sequence lacks the entire FLT3L transmembrane domain and 1, 2, 3, 4, 5, 6, 7, 8, 9 or 10 amino acids from the carboxy-terminus of the FLT3L extracellular domain. In another embodiment, the FLT3L encoded by the third nucleotide sequence lacks the entire FLT3L transmembrane domain and 11, 12, 13, 14, 15, 16, 17, 18, 19 or 20 amino acids from the carboxy-terminus of the FLT3L extracellular domain. In another embodiment, the FLT3L encoded by the third nucleotide sequence lacks the entire FLT3L transmembrane domain and 1-5, 1-10, 5-10, 10-20, 15-20, 1-20, 5-20, or 10-20 amino acids from the carboxy-terminus of the FLT3L extracellular domain. In certain of the embodiments and aspects, the transmembrane and extracellular domains are of the FLT3L sequence set forth in GenBank Accession No. U03858.1.

[0502] In another embodiment, the FLT3L encoded by the third nucleotide sequence lacks at least 80%, at least 85%, at least 90%, or at least 95% of the FLT3L transmembrane domain and 1, 2, 3, 4, 5, 6, 7, 8, 9 or 10 amino acids from the carboxy-terminus of the FLT3L extracellular domain. In another embodiment, the FLT3L encoded by the third nucleotide sequence lacks at least 80%, at least 85%, at least 90%, or at least 95% of the FLT3L transmembrane domain and 11, 12, 13, 14, 15, 16, 17, 18, 19 or 20 amino acids from the carboxy-terminus of the FLT3L extracellular domain. In another embodiment, the FLT3L encoded by the third nucleotide sequence lacks at least 80%, at least 85%, at least 90%, or at least 95% of the FLT3L transmembrane domain and 1-5, 1-10, 5-10, 10-20, 15-20, 1-20, 5-20, or 10-20 amino acids from the carboxy-terminus of the FLT3L extracellular domain. In certain of the embodiments and aspects, the transmembrane and extracellular domains are of the FLT3L sequence set forth in GenBank Accession No. U03858.1.

[0503] In another embodiment, the FLT3L encoded by the third nucleotide sequence lacks the entire FLT3L transmembrane domain, the entire cytoplasmic domain, and 1, 2, 3, 4, 5, 6, 7, 8, 9 or 10 amino acids from the carboxy-terminus of the FLT3L extracellular domain. In another embodiment, the FLT3L encoded by the third nucleotide sequence lacks the entire FLT3L transmembrane domain, the entire cytoplasmic domain, and 11, 12, 13, 14, 15, 16, 17, 18, 19 or 20 amino acids from the carboxy-terminus of the FLT3L extracellular domain. In another embodiment, the FLT3L encoded by the third nucleotide sequence lacks the entire FLT3L transmembrane domain, the entire cytoplasmic domain, and 1-5, 1-10, 5-10, 10-20, 15-20, 1-20, 5-20, or 10-20 amino acids from the carboxy-terminus of the FLT3L extracellular domain. In certain of the embodiments and aspects, the transmembrane, cytoplasmic and extracellular domains are of the FLT3L sequence set forth in GenBank Accession No. U03858.1.

[0504] In another embodiment, the FLT3L encoded by the third nucleotide sequence lacks at least 25%, at least 30%, at least 40%, at least 50%, at least 60%, at least 70%, at least 80%, at least 85%, at least 90%, or at least 95% of the FLT3L transmembrane domain, the entire cytoplasmic domain, and 1, 2, 3, 4, 5, 6, 7, 8, 9 or 10 amino acids from the carboxy-terminus of the FLT3L extracellular domain. In another embodiment, the FLT3L encoded by the third nucleotide sequence lacks at least 25%, at least 30%, at least 40%, at least 50%, at least 60%, at least 70%, at least 80%, at least 85%, at least 90%, or at least 95% of the FLT3L transmembrane domain, the entire cytoplasmic domain, and 11, 12, 13, 14, 15, 16, 17, 18, 19 or 20 amino acids from the carboxy-terminus of the FLT3L extracellular domain. In another embodiment, the FLT3L encoded by the third nucleotide sequence lacks at least 25%, at least 30%, at least 40%, at least 50%, at least 60%, at least 70%, at least 80%, at least 85%, at least 90%, or at least 95% of the FLT3L transmembrane domain, the entire cytoplasmic domain, and 1-5, 1-10, 5-10, 10-20, 15-20, 1-20, 5-20, or 10-20 amino acids from the carboxy-terminus of the FLT3L extracellular domain. In certain of the embodiments and aspects, the transmembrane, cytoplasmic and extracellular domains are of the FLT3L sequence set forth in GenBank Accession No. U03858.1.

[0505] In another embodiment, the FLT3L encoded by the third nucleotide sequence lacks the entire FLT3L transmembrane domain, at least 25%, at least 30%, at least 40%, at least 50%, at least 60%, at least 70%, at least 80%, at least 85%, at least 90%, or at least 95% of the cytoplasmic domain, and 1, 2, 3, 4, 5, 6, 7, 8, 9 or 10 amino acids from the carboxy-terminus of the FLT3L extracellular domain. In another embodiment, the FLT3L encoded by the third nucleotide sequence lacks the entire FLT3L transmembrane domain, at least 25%, at least 30%, at least 40%, at least 50%, at least 60%, at least 70%, at least 80%, at least 85%, at least 90%, or at least 95% of the cytoplasmic domain, and 11, 12, 13, 14, 15, 16, 17, 18, 19 or 20 amino acids from the carboxy-terminus of the FLT3L extracellular domain. In another embodiment, the FLT3L encoded by the third nucleotide sequence lacks the entire FLT3L transmembrane domain, at least 25%, at least 30%, at least 40%, at least 50%, at least 60%, at least 70%, at least 80%, at least 85%, at least 90%, or at least 95% of the cytoplasmic domain, and 1-5, 1-10, 5-10, 10-20, 15-20, 1-20, 5-20, or 10-20 amino acids from the carboxy-terminus of the FLT3L extracellular domain. In certain of the embodiments and aspects, the transmembrane, cytoplasmic and extracellular domains are of the FLT3L sequence set forth in GenBank Accession No. U03858.1.

[0506] In another embodiment, the FLT3L encoded by the third nucleotide sequence lacks at least 80%, at least 85%, at least 90%, or at least 95% of the FLT3L transmembrane domain, at least 25%, at least 30%, at least 40%, at least 50%, at least 60%, at least 70%, at least 80%, at least 85%, at least 90%, or at least 95% of the cytoplasmic domain, and 1, 2, 3, 4, 5, 6, 7, 8, 9 or 10 amino acids from the carboxy-terminus of the FLT3L extracellular domain. In another embodiment, the FLT3L encoded by the third nucleotide sequence lacks at least 80%, at least 85%, at least 90%, or at least 95% of the FLT3L transmembrane domain, at least 25%, at least 30%, at least 40%, at least 50%, at least 60%, at least 70%, at least 80%, at least 85%, at least 90%, or at least 95% of the cytoplasmic domain, and 11, 12, 13, 14, 15, 16, 17, 18, 19 or 20 amino acids from the carboxy-terminus of the FLT3L extracellular domain. In another embodiment, the FLT3L encoded by the third nucleotide sequence lacks at least 80%, at least 85%, at least 90%, or at least 95% of the FLT3L transmembrane domain, at least 25%, at least 30%, at least 40%, at least 50%, at least 60%, at least 70%, at least 80%, at least 85%, at least 90%, or at least 95% of the cytoplasmic domain, and 1-5, 1-10, 5-10, 10-20, 15-20, 1-20, 5-20, or 10-20 amino acids from the carboxy-terminus of the FLT3L extracellular domain. In certain of the embodiments and aspects, the transmembrane, cytoplasmic and extracellular domains are of the FLT3L sequence set forth in GenBank Accession No. U03858.1.

[0507] In another embodiment, the FLT3L encoded by the third nucleotide sequence lacks the entire FLT3L transmembrane domain, 1, 2, 3, 4, 5, 6, 7, 8, 9, 10, 12, 13, 14, or 15 of the N-terminal amino acid residues of the cytoplasmic domain, and 1, 2, 3, 4, 5, 6, 7, 8, 9 or 10 amino acids from the carboxy-terminus of the FLT3L extracellular domain. In another embodiment, the FLT3L encoded by the third nucleotide sequence lacks the entire FLT3L transmembrane domain, 1, 2, 3, 4, 5, 6, 7, 8, 9, 10, 12, 13, 14, or 15 of the N-terminal amino acid residues of the cytoplasmic domain, and 11, 12, 13, 14, 15, 16, 17, 18, 19 or 20 amino acids from the carboxy-terminus of the FLT3L extracellular domain. In another embodiment, the FLT3L encoded by the third nucleotide sequence lacks the entire FLT3L transmembrane domain, 1, 2, 3, 4, 5, 6, 7, 8, 9, 10, 12, 13, 14, or 15 of the N-terminal amino acid residues of the cytoplasmic domain, and 1-5, 1-10, 5-10, 10-20, 15-20, 1-20, 5-20, or 10-20 amino acids from the carboxy-terminus of the FLT3L extracellular domain. In certain of the embodiments and aspects, the transmembrane, cytoplasmic and extracellular domains are of the FLT3L sequence set forth in GenBank Accession No. U03858.1.

[0508] In another embodiment, the FLT3L encoded by the third nucleotide sequence lacks at least 80%, at least 85%, at least 90%, or at least 95% of the FLT3L transmembrane domain, 1, 2, 3, 4, 5, 6, 7, 8, 9, 10, 12, 13, 14, or 15 of the N-terminal amino acid residues of the cytoplasmic domain, and 1, 2, 3, 4, 5, 6, 7, 8, 9 or 10 amino acids from the carboxy-terminus of the FLT3L extracellular domain. In another embodiment, the FLT3L encoded by the third nucleotide sequence lacks at least 80%, at least 85%, at least 90%, or at least 95% of the FLT3L transmembrane domain, 1, 2, 3, 4, 5, 6, 7, 8, 9, 10, 12, 13, 14, or 15 of the N-terminal amino acid residues of the cytoplasmic domain, and 11, 12, 13, 14, 15, 16, 17, 18, 19 or 20 amino acids from the carboxy-terminus of the FLT3L extracellular domain. In another embodiment, the FLT3L encoded by the third nucleotide sequence lacks at least 80%, at least 85%, at least 90%, or at least 95% of the FLT3L transmembrane domain, 1, 2, 3, 4, 5, 6, 7, 8, 9, 10, 12, 13, 14, or 15 of the N-terminal amino acid residues of the cytoplasmic domain, and 1-5, 1-10, 5-10, 10-20, 15-20, 1-20, 5-20, or 10-20 amino acids from the carboxy-terminus of the FLT3L extracellular domain. In certain of the embodiments and aspects, the transmembrane, cytoplasmic and extracellular domains are of the FLT3L sequence set forth in GenBank Accession No. U03858.1.

[0509] In a specific embodiment, the FLT3L encoded by the third nucleotide sequence is an X7 isoform and the third nucleotide sequence lacks a 179-nucleotide sequence as described in Lyman et al., 1994, Blood 83:2795-2801. In specific embodiments, the FLT3L comprises the amino acid sequence set forth in SEQ ID NO: 213. In specific embodiments, the third nucleotide sequence comprises the sequence set forth in SEQ ID NO: 216. In specific embodiments, the third nucleotide sequence is set forth in SEQ ID NO: 216.

[0510] In a specific embodiment of the various embodiments and aspects described herein, the at least one promoter operably linked to the third nucleotide sequence encoding FLT3L is a B8R promoter. In a specific embodiment of the various embodiments and aspects described herein, the at least one promoter operably linked to the third nucleotide sequence encoding FLT3L is a B19R promoter. In a specific embodiment of the various embodiments and aspects described herein, the at least one promoter operably linked to the third nucleotide sequence encoding FLT3L is a B8R promoter and a B19R promoter. In a particular embodiment, the B8R promoter comprises the nucleotide sequence of SEQ ID NO: 564. In a particular embodiment, the B19R promoter comprises the nucleotide sequence of SEQ ID NO: 565.

[0511] The invention also contemplates nucleic acids as described herein which further comprise a fourth transgene comprising a fourth nucleotide sequence encoding a detectable marker, e.g., a fluorescent marker (for example, a green fluorescent protein (GFP) such as an enhanced GFP (eGFP)). In certain embodiments, the nucleic acid further comprises a nucleotide sequence comprising at least one promoter operably linked to the fourth nucleotide sequence encoding the fluorescent marker. In certain embodiments, the fourth nucleotide sequence encoding the fluorescent marker is linked and downstream of one of the first, second, and third nucleotide sequences.

[0512] In a specific embodiment, the at least one promoter operably linked to the fourth nucleotide sequence encoding the fluorescent marker is an E3L promoter. In another specific embodiment, the at least one promoter operably linked to the fourth nucleotide sequence encoding the fluorescent marker is a p7.5 promoter.

[0513] In specific embodiments, provided herein is a vector comprising a nucleotide sequence of SEQ ID NO: 210 or SEQ ID NO: 624 with transgene(s) identified in Table 45, inserted into the locus (loci) identified in Table 45, and operably linked to the promoter(s) identified in Table 45. In specific embodiments, provided herein is a vector as described in Table 45.

[0514] It is also contemplated that the first transgene, the second transgene, the third transgene, and/or the fourth transgene can be inserted into the TK gene locus. The other transgenes (if any) can be inserted at other loci, for example, between the partial C2L and F3L vaccinia genes, the locus of the deletion in the B8R gene, between the partial B14R and B29R vaccinia genes, and/or the HA gene locus. In some embodiments, the recombinant vaccinia virus genome comprises a deletion in the TK gene. In a specific embodiment, the first transgene, the second transgene, the third transgene, and/or the fourth transgene is inserted into the locus of the deletion in the TK gene. In other embodiments, the TK gene is not deleted but the first transgene, the second transgene, the third transgene, and/or the fourth transgene is inserted into the TK gene and disrupts the function of the TK gene.

[0515] In other embodiments, the recombinant vaccinia virus genome comprises a functional, e.g., wild-type, TK gene and none of the transgene(s) is inserted into the TK gene locus. A wild-type TK gene includes a TK gene naturally found in a vaccinia virus genome.

[0516] It is also contemplated that the first transgene, the second transgene, the third transgene, and/or the fourth transgene can be inserted into the HA gene locus. The other transgenes (if any) can be inserted at other loci, for example, between the partial C2L and F3L vaccinia genes, the locus of the deletion in the B8R gene, between the partial B14R and B29R vaccinia genes, and/or the TK gene locus. In some embodiments, the recombinant vaccinia virus genome comprises a deletion in the HA gene. In a specific embodiment, the first transgene, the second transgene, the third transgene, and/or the fourth transgene is inserted into the locus of the deletion in the HA gene. In other embodiments, the HA gene is not deleted but the first transgene, the second transgene, the third transgene, and/or the fourth transgene is inserted into the HA gene and disrupts the function of the HA gene.

[0517] In other embodiments, the recombinant vaccinia virus genome comprises a functional, e.g., wild-type, HA gene and none of the transgene(s) is inserted into the HA gene locus. A wild-type HA gene includes a HA gene naturally found in a vaccinia virus genome.

[0518] In certain embodiments of the various embodiments and aspects described herein, at least one promoter is operably linked to the first nucleotide sequence, the second nucleotide sequence and/or the third nucleotide sequence, wherein the at least one promoter is an early promoter, a late promoter, or an early/late promoter. In particular embodiments, the at least one promoter is an early promoter and a late promoter. In specific embodiments, a late promoter may comprise a TAAAT nucleotide sequence (SEQ ID NO. 631).

[0519] In certain embodiments of the various embodiments and aspects described herein, the at least one promoter operably linked to the first nucleotide sequence encoding the anti-CTLA-4 antibody is an early promoter, a late promoter, or an early/late promoter. In particular embodiments, the at least one promoter is an early promoter and a late promoter. In specific embodiments, a late promoter may comprise a TAAAT nucleotide sequence (SEQ ID NO. 631). In a specific embodiment, the at least one promoter operably linked to the first nucleotide sequence is an H5R early promoter (e.g., comprising the nucleotide sequence of AAAAATGAAAATAAA (SEQ ID NO. 630) or TAAAAAATGAAAATAAATACAAAGGTTCTT (SEQ ID NO. 553), optionally with one, two, three, four, five, or more nucleotides upstream and/or downstream of the sequence). In another specific embodiment, the at least one promoter operably linked to the first nucleotide sequence is an H5R late promoter (e.g., comprising the nucleotide sequence of TAAAT (SEQ ID NO. 631), TCTTGAGGGTTGTGTTAAATTGAAAGCGAGAAATAATCATAAAT (SEQ ID NO. 632), or AAATTGAAAGCGAGAAATAATCATAAAT (SEQ ID NO. 554), optionally with one, two, three, four, five, or more nucleotides upstream and/or downstream of the sequence). In a specific embodiment, the at least one promoter operably linked to the first nucleotide sequence is an H5R early promoter (e.g., comprising the nucleotide sequence of AAAAATGAAAATAAA (SEQ ID NO. 630) or TAAAAAATGAAAATAAATACAAAGGTTCTT (SEQ ID NO. 553), optionally with one, two, three, four, five, or more nucleotides upstream and/or downstream of the sequence) and an H5R late promoter (e.g., comprising the nucleotide sequence of TAAAT (SEQ ID NO. 631), TCTTGAGGGTTGTGTTAAATTGAAAGCGAGAAATAATCATAAAT (SEQ ID NO. 632), or AAATTGAAAGCGAGAAATAATCATAAAT (SEQ ID NO. 554), optionally with one, two, three, four, five, or more nucleotides upstream and/or downstream of the sequence). When the H5R late promoter comprises the nucleotide sequence of TAAAT (SEQ ID NO. 631), in one embodiment, the nucleic acid comprises an intervening sequence between TAAAT and the ATG translation initiation codon (for example, an intervening sequence that is about 10, 20, 30, or 40-nucleotide in length); in another embodiment, there is no intervening sequence between TAAAT and the ATG translation initiation codon (for example, the last two nucleotides of TAAAT are the first two nucleotides of the ATG translation initiation codon). In another specific embodiment, the at least one promoter operably linked to the first nucleotide sequence is a pS early promoter (e.g., comprising the nucleotide sequence of AAAATTGAAATTTTA (SEQ ID NO. 555)). In another specific embodiment, the at least one promoter operably linked to the first nucleotide sequence is a pS late promoter (e.g., comprising the nucleotide sequence of TTTTATTTTTTTTTTTTGGAATATAAATA (SEQ ID NO. 556)). In another specific embodiment, the at least one promoter operably linked to the first nucleotide sequence is a pS early/late promoter (e.g., comprising the nucleotide sequence of AAAATTGAAATTTTATTTTTTTTTTTTGGAATATAAATA (SEQ ID NO. 557)). In another specific embodiment, the at least one promoter operably linked to the first nucleotide sequence is a LEO early promoter (e.g., comprising the nucleotide sequence of TTTTATTTTTTTTTTTTGGAATATAAATA (SEQ ID NO. 556)). In another specific embodiment, the at least one promoter operably linked to the first nucleotide sequence is a LEO late promoter (e.g., comprising the nucleotide sequence of AAAATTGAAAAAATA (SEQ ID NO. 558)). In another specific embodiment, the at least one promoter operably linked to the first nucleotide sequence is a LEO early/late promoter (e.g., comprising the nucleotide sequence of TTTTATTTTTTTTTTTTGGAATATAAATATCCGGTAAAATTGAAAAAATA (SEQ ID NO. 559)).

[0520] In certain embodiments of the various embodiments and aspects described herein, the at least one promoter operably linked to the second nucleotide sequence encoding the IL-12 polypeptide is a late promoter. In a specific embodiment, the late promoter comprises the nucleotide sequence of TTNTTTTTTNTTTTTTTNNNNTATAAAT (SEQ ID NO: 560, wherein N is any nucleotide). In another specific embodiment, the late promoter comprises the nucleotide sequence of TTGTATTTTCTTTTGTTGGCATATAAAT (SEQ ID NO: 561). In another specific embodiment, the late promoter is a D13L promoter (e.g., comprising the nucleotide sequence of TTTATTGTAAGCTTTTTCCATTTTAAAT (SEQ ID NO. 562)). In another specific embodiment, the late promoter is a F17R promoter (e.g., comprising the nucleotide sequence of TCATTTTGTTTTTTTCTATGCTATAAAT (SEQ ID NO. 563)).

[0521] In certain embodiments of the various embodiments and aspects described herein, the at least one promoter operably linked to the third nucleotide sequence encoding FLT3L is an early promoter, a late promoter, or an early/late promoter. In a specific embodiment, the at least one promoter operably linked to the third nucleotide sequence is the B8R promoter (e.g., comprising the nucleotide sequence of TAAAAATTTAAAATATATTATCACTTCAGT (SEQ ID NO. 564)). In another specific embodiment, the at least one promoter operably linked to the third nucleotide sequence is the B19R promoter (e.g., comprising the nucleotide sequence of AAAAAACTGATATTATATAAATATTTTAGT (SEQ ID NO. 565)). In another specific embodiment, the at least one promoter operably linked to the third nucleotide sequence comprises the nucleotide sequence of NNAAAANTGAAAANATA (SEQ ID NO. 566, wherein N is any nucleotide). In another specific embodiment, the at least one promoter operably linked to the third nucleotide sequence is the E3L promoter (e.g., comprising the nucleotide sequence of AAAAAAATGATAAAGTAGGTTCAGTTTTAT (SEQ ID NO. 567)). In another specific embodiment, the at least one promoter operably linked to the third nucleotide sequence is the F11L promoter (e.g., comprising the nucleotide sequence of TAAAAAGTGAAAAACAATATTATTTTTATC (SEQ ID NO. 568)). In another specific embodiment, the at least one promoter operably linked to the third nucleotide sequence is the B2R promoter (e.g., comprising the nucleotide sequence of AAAATTAAAAAATAACTTAATTTATTATTG (SEQ ID NO. 569)).

[0522] In certain embodiments of the various embodiments and aspects described herein, the promoter sequence overlaps with or is within about 100 nucleotide of the translation initiation codon of transgene to which the promoter is operatively linked. In a specific embodiment, the promoter sequence is within about 80 nucleotides of the translation initiation codon of the transgene to which the promoter is operatively linked. In a specific embodiment, the promoter sequence is within about 70 nucleotides of the translation initiation codon of the transgene to which the promoter is operatively linked. In a specific embodiment, the promoter sequence is within about 60 nucleotides of the translation initiation codon of the transgene to which the promoter is operatively linked. In a specific embodiment, the promoter sequence is within about 50 nucleotides of the translation initiation codon of the transgene to which the promoter is operatively linked. In another specific embodiment, the promoter sequence is within about 40 nucleotides of the translation initiation codon of the transgene to which the promoter is operatively linked. In another specific embodiment, the promoter sequence is within about 30 nucleotides of the translation initiation codon of the transgene to which the promoter is operatively linked. In another specific embodiment, the promoter sequence is within about 20 nucleotides of the translation initiation codon of the transgene to which the promoter is operatively linked. In another specific embodiment, the promoter sequence is within about 10 nucleotides of the translation initiation codon of the transgene to which the promoter is operatively linked. In another specific embodiment, the promoter sequence is within about 5 nucleotides of the translation initiation codon of the transgene to which the promoter is operatively linked. In another specific embodiment, the promoter sequence is within 2 nucleotides of the translation initiation codon of the transgene to which the promoter is operatively linked. In another specific embodiment, the promoter sequence overlaps with the translation initiation codon of the transgene to which the promoter is operatively linked.

[0523] In certain embodiments of the various embodiments and aspects described herein wherein the nucleic acid comprises a transgene comprising a nucleotide sequence the nucleic acid may further comprises a nucleotide sequence comprising an untranslated region (UTR), for example, a H5R UTR or a portion thereof, e.g., at least 80%, at least 85%, at least 90%, or at least 95% of the H5R UTR, operably linked to the nucleotide sequence. In a specific embodiment, the H5R UTR or a portion thereof comprises a H5R early promoter (e.g., comprising the nucleotide sequence of AAAAATGAAAATAAA (SEQ ID NO. 630) or TAAAAAATGAAAATAAATACAAAGGTTCTT (SEQ ID NO. 553), optionally with one, two, three, four, five, or more nucleotides upstream and/or downstream of the sequence). In another specific embodiment, the H5R UTR or a portion thereof comprises a H5R late promoter (e.g., comprising the nucleotide sequence of TAAAT (SEQ ID NO. 631), TCTTGAGGGTTGTGTTAAATTGAAAGCGAGAAATAATCATAAAT (SEQ ID NO. 632), or AAATTGAAAGCGAGAAATAATCATAAAT (SEQ ID NO. 554), optionally with one, two, three, four, five, or more nucleotides upstream and/or downstream of the sequence). In another specific embodiment, the H5R UTR or a portion thereof comprises the H5R early promoter (e.g., comprising the nucleotide sequence of AAAAATGAAAATAAA (SEQ ID NO. 630) or TAAAAAATGAAAATAAATACAAAGGTTCTT (SEQ ID NO. 553), optionally with one, two, three, four, five, or more nucleotides upstream and/or downstream of the sequence) and the H5R late promoter (e.g., comprising the nucleotide sequence of TAAAT (SEQ ID NO. 631), TCTTGAGGGTTGTGTTAAATTGAAAGCGAGAAATAATCATAAAT (SEQ ID NO. 632), or AAATTGAAAGCGAGAAATAATCATAAAT (SEQ ID NO. 554), optionally with one, two, three, four, five, or more nucleotides upstream and/or downstream of the sequence). In another specific embodiment, the H5R UTR comprises the nucleotide sequence of TTAAAGTTACAAACAACTAGGAAATTGGTTTATGATGTATAATTTTTTTAGTTTTT ATAGATTCTTTATTCTATACTTAAAAAATGAAAATAAATACAAAGGTTCTTGAGG GTTGTGTTAAATTGAAAGCGAGAAATAATCATAAATTATTTCATTATCGCGATAT CCGTTAAGTTTGTATCGTA (SEQ ID NO. 626).

[0524] In specific embodiments of the various embodiments and aspects described herein wherein the nucleic acid comprises a first transgene comprising a first nucleotide sequence encoding an antibody or antigen-binding fragment thereof that specifically binds to CTLA-4, the nucleic acid may further comprise a nucleotide sequence encoding an untranslated region (UTR). For example, the UTR can comprise an H5R UTR or a portion thereof (e.g., at least 80%, at least 85%, at least 90%, or at least 95% of the H5R UTR) operably linked to the first nucleotide sequence. In a specific embodiment, the H5R UTR comprises a H5R early promoter (e.g., comprising the nucleotide sequence of AAAAATGAAAATAAA (SEQ ID NO. 630) or TAAAAAATGAAAATAAATACAAAGGTTCTT (SEQ ID NO. 553), optionally with one, two, three, four, five, or more nucleotides upstream and/or downstream of the sequence). In another specific embodiment, the H5R UTR comprises a H5R late promoter (e.g., comprising the nucleotide sequence of TAAAT (SEQ ID NO. 631), TCTTGAGGGTTGTGTTAAATTGAAAGCGAGAAATAATCATAAAT (SEQ ID NO. 632), or AAATTGAAAGCGAGAAATAATCATAAAT (SEQ ID NO. 554), optionally with one, two, three, four, five, or more nucleotides upstream and/or downstream of the sequence). In another specific embodiment, the H5R UTR comprises a H5R early promoter (e.g., comprising the nucleotide sequence of AAAAATGAAAATAAA (SEQ ID NO. 630) or TAAAAAATGAAAATAAATACAAAGGTTCTT (SEQ ID NO. 553), optionally with one, two, three, four, five, or more nucleotides upstream and/or downstream of the sequence) and a H5R late promoter (e.g., comprising the nucleotide sequence of TAAAT (SEQ ID NO. 631), TCTTGAGGGTTGTGTTAAATTGAAAGCGAGAAATAATCATAAAT (SEQ ID NO. 632), or AAATTGAAAGCGAGAAATAATCATAAAT (SEQ ID NO. 554), optionally with one, two, three, four, five, or more nucleotides upstream and/or downstream of the sequence). In another specific embodiment, the H5R UTR comprises the nucleotide sequence of TTAAAGTTACAAACAACTAGGAAATTGGTTTATGATGTATAATTTTTTTAGTTTTT ATAGATTCTTTATTCTATACTTAAAAAATGAAAATAAATACAAAGGTTCTTGAGG GTTGTGTTAAATTGAAAGCGAGAAATAATCATAAATTATTTCATTATCGCGATAT CCGTTAAGTTTGTATCGTA (SEQ ID NO. 626).

[0525] In certain embodiments of the various embodiments and aspects described herein, at least one, two, three, four, five, six, seven, eight, nine, ten, twenty, thirty, forty, fifty, sixty, seventy, eighty, ninety, or a hundred of, or all of the following genes are not deleted from the recombinant vaccinia virus genome: C3L, C4L, CSL, C6L, C7L, CBL, C9L, C10L, C11R, C12L, C13L, C14L, C15L (in the 5′ ITR), C16L (in the 5′ ITR), C17L (in the 5′ ITR), C18L (in the 5′ ITR), C19L (in the 5′ ITR), C2OL (in the 5′ ITR), C21L (in the 5′ ITR), C22L (in the 5′ ITR), C23L (in the 5′ ITR), F4L, FSL, F6L, F7L, F8L, F9L, F10L, F11L, F12L, F13L, F14L, F15L, F16L, F17R, E1L, E2L, E3L, E4L, ESR, E6R, E7R, EBR, E9L, E10R, E11L, O1L, O2L, I1L, I2L, I3L, I4L, I5L, I6L, I7L, I8R, G1L, G2R, G3L, G4L, G5R, G6R, G7L, G8R, G9R, L1R, L2R, L3L, L4R, LSR, J1R, J2R, J3R, J4R, J5L, J6R, H1L, H2R, H3L, H4L, H5R, H6R, H7R, D1R, D2L, D3R, D4R, D5R, D6R, D7R, D8L, D9R, D10R, D11L, D12L, D13L, A1L, A2L, A3L, A4L, ASR, A6L, A7L, A8R, A9L, A10L, A11R, A12L, A13L, A14L, A15L, A16L, A17L, A18R, A19L, A20R, A21L, A22R, A23R, A24R, A25L, A26L, A27L, A28L, A29L, A30L, A31R, A32L, A33R, A34R, A35R, A36R, A37R, A38L, A39R, A4OR, A41L, A42R, A43R, A44L, A45R, A46R, A47L, A48R, A49R, ASOR, A51R, A52R, A53R, A54L, A55R, A56R, A57R, B1R, B2R, B3R, B4R, B5R, B6R, B7R, B8R, B9R, B10R, B11R, B12R, and B13R (see, e.g., Goebel et al., 1990, Virology 179(1):247-266 for a description of the genes, which is incorporated herein by reference for such description).

[0526] In another aspect, provided herein is a nucleic acid comprising the nucleic acid sequence described in Table 43.

[0527] In another aspect, provided herein is a nucleic acid described in an example in Section 6.

[0528] In one aspect, provided are nucleic acids comprising a recombinant orthopoxvirus genome, wherein said recombinant orthopoxvirus genome comprises a deletion of at least 2 genes selected from the group consisting of the C2L, C1L, N1L, N2L, M1L, M2L, K1L, K2L, K3L, K4L, K5L, K6L, K7R, F1L, F2L, F3L, B14R, B15R, B16R, B17L, B18R, B19R, and B20R genes.

[0529] In some embodiments, said recombinant orthopoxvirus genome comprises a deletion of at least 3 genes, each gene selected from the group consisting of the C2L, C1L, N1L, N2L, M1L, M2L, K1L, K2L, K3L, K4L, K5L, K6L, K7R, F1L, F2L, F3L, B14R, B15R, B16R, B17L, B18R, B19R, and B20R genes.

[0530] In some embodiments, said recombinant orthopoxvirus genome comprises a deletion of at least 4 genes, each gene selected from the group consisting of the C2L, C1L, N1L, N2L, M1L, M2L, K1L, K2L, K3L, K4L, K5L, K6L, K7R, F1L, F2L, F3L, B14R, B15R, B16R, B17L, B18R, B19R, and B20R genes.

[0531] In some embodiments, said recombinant orthopoxvirus genome comprises a deletion of at least 5 genes, each gene selected from the group consisting of the C2L, C1L, N1L, N2L, M1L, M2L, K1L, K2L, K3L, K4L, K5L, K6L, K7R, F1L, F2L, F3L, B14R, B15R, B16R, B17L, B18R, B19R, and B20R genes.

[0532] In some embodiments, said recombinant orthopoxvirus genome comprises a deletion of at least 6 genes, each gene selected from the group consisting of the C2L, C1L, N1L, N2L, M1L, M2L, K1L, K2L, K3L, K4L, K5L, K6L, K7R, F1L, F2L, F3L, B14R, B15R, B16R, B17L, B18R, B19R, and B20R genes.

[0533] In some embodiments, said recombinant orthopoxvirus genome comprises a deletion of at least 7 genes, each gene selected from the group consisting of the C2L, C1L, N1L, N2L, M1L, M2L, K1L, K2L, K3L, K4L, K5L, K6L, K7R, F1L, F2L, F3L, B14R, B15R, B16R, B17L, B18R, B19R, and B20R genes.

[0534] In some embodiments, said recombinant orthopoxvirus genome comprises a deletion of at least 8 genes, each gene selected from the group consisting of the C2L, C1L, N1L, N2L, M1L, M2L, K1L, K2L, K3L, K4L, K5L, K6L, K7R, F1L, F2L, F3L, B14R, B15R, B16R, B17L, B18R, B19R, and B20R genes.

[0535] In some embodiments, said recombinant orthopoxvirus genome comprises a deletion of at least 9 genes, each gene selected from the group consisting of the C2L, C1L, N1L, N2L, M1L, M2L, K1L, K2L, K3L, K4L, K5L, K6L, K7R, F1L, F2L, F3L, B14R, B15R, B16R, B17L, B18R, B19R, and B20R genes.

[0536] In some embodiments, said recombinant orthopoxvirus genome comprises a deletion of at least 10 genes, each gene selected from the group consisting of the C2L, C1L, N1L, N2L, M1L, M2L, K1L, K2L, K3L, K4L, K5L, K6L, K7R, F1L, F2L, F3L, B14R, B15R, B16R, B17L, B18R, B19R, and B20R genes.

[0537] In some embodiments, said recombinant orthopoxvirus genome comprises a deletion of at least 11 genes, each gene selected from the group consisting of the C2L, C1L, N1L, N2L, M1L, M2L, K1L, K2L, K3L, K4L, K5L, K6L, K7R, F1L, F2L, F3L, B14R, B15R, B16R, B17L, B18R, B19R, and B20R genes.

[0538] In some embodiments, said recombinant orthopoxvirus genome comprises a deletion of at least 12 genes, each gene selected from the group consisting of the C2L, C1L, N1L, N2L, M1L, M2L, K1L, K2L, K3L, K4L, K5L, K6L, K7R, F1L, F2L, F3L, B14R, B15R, B16R, B17L, B18R, B19R, and B20R genes.

[0539] In some embodiments, said recombinant orthopoxvirus genome comprises a deletion of at least 13 genes, each gene selected from the group consisting of the C2L, C1L, N1L, N2L, M1L, M2L, K1L, K2L, K3L, K4L, K5L, K6L, K7R, F1L, F2L, F3L, B14R, B15R, B16R, B17L, B18R, B19R, and B20R genes.

[0540] In some embodiments, said recombinant orthopoxvirus genome comprises a deletion of at least 14 genes, each gene selected from the group consisting of the C2L, C1L, N1L, N2L, M1L, M2L, K1L, K2L, K3L, K4L, K5L, K6L, K7R, F1L, F2L, F3L, B14R, B15R, B16R, B17L, B18R, B19R, and B20R genes.

[0541] In some embodiments, said recombinant orthopoxvirus genome comprises a deletion of at least 15 genes, each gene selected from the group consisting of the C2L, C1L, N1L, N2L, M1L, M2L, K1L, K2L, K3L, K4L, K5L, K6L, K7R, F1L, F2L, F3L, B14R, B15R, B16R, B17L, B18R, B19R, and B20R genes.

[0542] In some embodiments, said recombinant orthopoxvirus genome comprises a deletion of at least 16 genes, each gene selected from the group consisting of the C2L, C1L, N1L, N2L, M1L, M2L, K1L, K2L, K3L, K4L, K5L, K6L, K7R, F1L, F2L, F3L, B14R, B15R, B16R, B17L, B18R, B19R, and B20R genes.

[0543] In some embodiments, said recombinant orthopoxvirus genome comprises a deletion of at least 17 genes, each gene selected from the group consisting of the C2L, C1L, N1L, N2L, M1L, M2L, K1L, K2L, K3L, K4L, K5L, K6L, K7R, F1L, F2L, F3L, B14R, B15R, B16R, B17L, B18R, B19R, and B20R genes.

[0544] In some embodiments, said recombinant orthopoxvirus genome comprises a deletion of at least 18 genes, each gene selected from the group consisting of the C2L, C1L, N1L, N2L, M1L, M2L, K1L, K2L, K3L, K4L, K5L, K6L, K7R, F1L, F2L, F3L, B14R, B15R, B16R, B17L, B18R, B19R, and B20R genes.

[0545] In some embodiments, said recombinant orthopoxvirus genome comprises a deletion of at least 19 genes, each gene selected from the group consisting of the C2L, C1L, N1L, N2L, M1L, M2L, K1L, K2L, K3L, K4L, K5L, K6L, K7R, F1L, F2L, F3L, B14R, B15R, B16R, B17L, B18R, B19R, and B20R genes.

[0546] In some embodiments, said recombinant orthopoxvirus genome comprises a deletion of at least 20 genes, each gene selected from the group consisting of the C2L, C1L, N1L, N2L, M1L, M2L, K1L, K2L, K3L, K4L, K5L, K6L, K7R, F1L, F2L, F3L, B14R, B15R, B16R, B17L, B18R, B19R, and B20R genes.

[0547] In some embodiments, said recombinant orthopoxvirus genome comprises a deletion of at least 21 genes, each gene selected from the group consisting of the C2L, C1L, N1L, N2L, M1L, M2L, K1L, K2L, K3L, K4L, K5L, K6L, K7R, F1L, F2L, F3L, B14R, B15R, B16R, B17L, B18R, B19R, and B20R genes.

[0548] In some embodiments, said recombinant orthopoxvirus genome comprises a deletion of at least 22 genes, each gene selected from the group consisting of the C2L, C1L, N1L, N2L, M1L, M2L, K1L, K2L, K3L, K4L, K5L, K6L, K7R, F1L, F2L, F3L, B14R, B15R, B16R, B17L, B18R, B19R, and B20R genes.

[0549] In some embodiments, said recombinant orthopoxvirus genome comprises a deletion of each of the C2L, C1L, N1L, N2L, M1L, M2L, K1L, K2L, K3L, K4L, K5L, K6L, K7R, F1L, F2L, F3L, B14R, B15R, B16R, B17L, B18R, B19R, and B20R genes.

[0550] In one aspect, provided are nucleic acids comprising a recombinant orthopoxvirus genome, wherein said recombinant orthopoxvirus genome comprises a deletion of at least 1 gene selected from the group consisting of the B14R, B15R, B16R, B17L, B18R, B19R, and B20R genes.

[0551] In some embodiments, said recombinant orthopoxvirus genome comprises a deletion of at least 2 genes, each gene selected from the group consisting of the B14R, B15R, B16R, B17L, B18R, B19R, and B20R genes.

[0552] In some embodiments, said recombinant orthopoxvirus genome comprises a deletion of at least 3 genes, each gene selected from the group consisting of the B14R, B15R, B16R, B17L, B18R, B19R, and B20R genes.

[0553] In some embodiments, said recombinant orthopoxvirus genome comprises a deletion of at least 4 genes, each gene selected from the group consisting of the B14R, B15R, B16R, B17L, B18R, B19R, and B20R genes.

[0554] In some embodiments, said recombinant orthopoxvirus genome comprises a deletion of at least 5 genes, each gene selected from the group consisting of the B14R, B15R, B16R, B17L, B18R, B19R, and B20R genes.

[0555] In some embodiments, said recombinant orthopoxvirus genome comprises a deletion of at least 6 genes, each gene selected from the group consisting of the B14R, B15R, B16R, B17L, B18R, B19R, and B20R genes.

[0556] In some embodiments, said recombinant orthopoxvirus genome comprises a deletion of each of the B14R, B15R, B16R, B17L, B18R, B19R, and B20R genes.

[0557] In one aspect, provided are nucleic acids comprising a recombinant orthopoxvirus genome, wherein said recombinant orthopoxvirus genome comprises a deletion of at least 1 gene selected from the group consisting of the C2L, C1L, N1L, N2L, M1L, M2L, K1L, K2L, K3L, K4L, K5L, K6L, K7R, F1L, F2L, and F3L genes.

[0558] In some embodiments, said recombinant orthopoxvirus genome comprises a deletion of at least 2 genes, each gene selected from the group consisting of the C2L, C1L, N1L, N2L, M1L, M2L, K1L, K2L, K3L, K4L, K5L, K6L, K7R, F1L, F2L, and F3L genes.

[0559] In some embodiments, said recombinant orthopoxvirus genome comprises a deletion of at least 3 genes, each gene selected from the group consisting of the C2L, C1L, N1L, N2L, M1L, M2L, K1L, K2L, K3L, K4L, K5L, K6L, K7R, F1L, F2L, and F3L genes.

[0560] In some embodiments, said recombinant orthopoxvirus genome comprises a deletion of at least 4 genes, each gene selected from the group consisting of the C2L, C1L, N1L, N2L, M1L, M2L, K1L, K2L, K3L, K4L, K5L, K6L, K7R, F1L, F2L, and F3L genes.

[0561] In some embodiments, said recombinant orthopoxvirus genome comprises a deletion of at least 5 genes, each gene selected from the group consisting of the C2L, C1L, N1L, N2L, M1L, M2L, K1L, K2L, K3L, K4L, K5L, K6L, K7R, F1L, F2L, and F3L genes.

[0562] In some embodiments, said recombinant orthopoxvirus genome comprises a deletion of at least 6 genes, each gene selected from the group consisting of the C2L, C1L, N1L, N2L, M1L, M2L, K1L, K2L, K3L, K4L, K5L, K6L, K7R, F1L, F2L, and F3L genes.

[0563] In some embodiments, said recombinant orthopoxvirus genome comprises a deletion of at least 7 genes, each gene selected from the group consisting of the C2L, C1L, N1L, N2L, M1L, M2L, K1L, K2L, K3L, K4L, K5L, K6L, K7R, F1L, F2L, and F3L genes.

[0564] In some embodiments, said recombinant orthopoxvirus genome comprises a deletion of at least 8 genes, each gene selected from the group consisting of the C2L, C1L, N1L, N2L, M1L, M2L, K1L, K2L, K3L, K4L, K5L, K6L, K7R, F1L, F2L, and F3L genes.

[0565] In some embodiments, said recombinant orthopoxvirus genome comprises a deletion of at least 9 genes, each gene selected from the group consisting of the C2L, C1L, N1L, N2L, M1L, M2L, K1L, K2L, K3L, K4L, K5L, K6L, K7R, F1L, F2L, and F3L genes.

[0566] In some embodiments, said recombinant orthopoxvirus genome comprises a deletion of at least 10 genes, each gene selected from the group consisting of the C2L, C1L, N1L, N2L, M1L, M2L, K1L, K2L, K3L, K4L, K5L, K6L, K7R, F1L, F2L, and F3L genes.

[0567] In some embodiments, said recombinant orthopoxvirus genome comprises a deletion of at least 11 genes, each gene selected from the group consisting of the C2L, C1L, N1L, N2L, M1L, M2L, K1L, K2L, K3L, K4L, K5L, K6L, K7R, F1L, F2L, and F3L genes.

[0568] In some embodiments, said recombinant orthopoxvirus genome comprises a deletion of at least 12 genes, each gene selected from the group consisting of the C2L, C1L, N1L, N2L, M1L, M2L, K1L, K2L, K3L, K4L, K5L, K6L, K7R, F1L, F2L, and F3L genes.

[0569] In some embodiments, said recombinant orthopoxvirus genome comprises a deletion of at least 13 genes, each gene selected from the group consisting of the C2L, C1L, N1L, N2L, M1L, M2L, K1L, K2L, K3L, K4L, K5L, K6L, K7R, F1L, F2L, and F3L genes.

[0570] In some embodiments, said recombinant orthopoxvirus genome comprises a deletion of at least 14 genes, each gene selected from the group consisting of the C2L, C1L, N1L, N2L, M1L, M2L, K1L, K2L, K3L, K4L, K5L, K6L, K7R, F1L, F2L, and F3L genes.

[0571] In some embodiments, said recombinant orthopoxvirus genome comprises a deletion of at least 15 genes, each gene selected from the group consisting of the C2L, C1L, N1L, N2L, M1L, M2L, K1L, K2L, K3L, K4L, K5L, K6L, K7R, F1L, F2L, and F3L genes.

[0572] In some embodiments, said recombinant orthopoxvirus genome comprises a deletion of each of the C2L, C1L, N1L, N2L, M1L, M2L, K1L, K2L, K3L, K4L, K5L, K6L, K7R, F1L, F2L, and F3L genes.

[0573] In some embodiments, said recombinant orthopoxvirus genome comprises a deletion of at least 1 gene that encodes a protein involved in host interaction. For example, in some embodiments, said protein affects calcium-independent adhesion to the extracellular matrix. In some embodiments, said protein is an NF-κB inhibitor, e.g., an NF-κB inhibitor encoded by a gene selected from the group consisting of the C2L, N1L, M2L, K1L, and K7R genes. In some embodiments, said protein is an apoptosis inhibitor, e.g., a caspase-9 inhibitor (such as one encoded by the F1L gene), a BCL-2-like protein (such as one encoded by N1L). In some embodiments, said protein is an interferon regulatory factor 3 (IRF3) inhibitor (such as one encoded by N2L or K7R), a serine protease inhibitor, a protein that prevents cell fusion (such as one encoded by K2L), an RNA-activated protein kinase (PKR) inhibitor (such as one encoded by K1L or K3L), a virulence factor (such as one encoded by F3L), an IL-1-beta inhibitor (such as one encoded by B16R), or a secreted IFNα sequestor (such as one encoded by B19R).

[0574] In some embodiments, said recombinant orthopoxvirus genome comprises a deletion of at least 1 gene encoding a protein involved in DNA replication. For example, in some embodiments, said protein is a DNA modifying nuclease (e.g., a protein encoded by K4L) or a deoxyuridine triphosphatase (dUTPase) (e.g., a protein encoded by is F2L). In some embodiments, at least one deleted gene's entire nucleotide sequence is deleted. In some embodiments, at least one deleted gene is only partially deleted, and the partial deletion is sufficient to render said partially deleted gene nonfunctional upon introduction into a host cell.

[0575] In some embodiments, said recombinant orthopoxvirus genome comprises at least two copies of inverted terminal repeats (ITRs).

[0576] In some embodiments, said recombinant orthopoxvirus genome lacks any copies of ITRs.

[0577] In some embodiments, said recombinant orthopoxvirus genome comprises a deletion in at least one copy of an ITR selected from the group consisting of B21R-ITR, B22R-ITR, B23R-ITR, B24R-ITR, B25R-ITR, B26R-ITR, B27R-ITR, B28R-ITR, and B29R-ITR.

[0578] In some embodiments, said recombinant orthopoxvirus genome comprises a deletion in at least all of the following copies of ITRs: B21R-ITR, B22R-ITR, B23R-ITR, B24R-ITR, B25R-ITR, B26R-ITR, B27R-ITR, B28R-ITR, and B29R-ITR.

[0579] In some embodiments, said recombinant orthopoxvirus genome comprises a deletion in the B8R gene.

[0580] In some embodiments, said recombinant orthopoxvirus genome comprises an intact B8R gene.

[0581] In one aspect, provided are nucleic acids comprising a recombinant orthopoxvirus genome, wherein said recombinant orthopoxvirus genome comprises (i) a deletion of each of the C2L, C1L, N1L, N2L, M1L, M2L, K1L, K2L, K3L, K4L, K5L, K6L, K7R, F1L, F2L, F3L, B14R, B15R, B16R, B17L, B18R, B19R, B20R, and B8R genes; and (ii) a deletion in each copy of the following ITRs: B21R-ITR, B22R-ITR, B23R-ITR, B24R-ITR, B25R-ITR, B26R-ITR, B27R-ITR, B28R-ITR, and B29R-ITR.

[0582] In one aspect, provided are nucleic acids comprising a recombinant orthopoxvirus genome, wherein said recombinant orthopoxvirus genome comprises (i) a deletion of each of the C2L, C1L, N1L, N2L, M1L, M2L, K1L, K2L, K3L, K4L, K5L, K6L, K7R, F1L, F2L, F3L, B14R, B15R, B16R, B17L, B18R, B19R, and B20R genes; and (ii) a deletion in each copy of the following ITRs: B21R-ITR, B22R-ITR, B23R-ITR, B24R-ITR, B25R-ITR, B26R-ITR, B27R-ITR, B28R-ITR, and B29R-ITR, wherein said recombinant orthopoxvirus genome comprises an intact B8R gene.

[0583] In some embodiments, provided nucleic acids further comprise at least one transgene selected from the group consisting of a transgene encoding an immune checkpoint inhibitor, a transgene encoding an interleukin (IL), and a transgene encoding a cytokine. In some embodiments, provided nucleic acids further comprise at least two transgenes selected from the group consisting of a transgene encoding an immune checkpoint inhibitor, a transgene encoding an interleukin (IL), and a transgene encoding a cytokine. In some embodiments, provided nucleic acids further comprise a transgene encoding an immune checkpoint inhibitor, a transgene encoding an interleukin (IL), and a transgene encoding a cytokine.

[0584] For example, in some embodiments, provided nucleic acids comprise a transgene encoding an immune checkpoint inhibitor. In some embodiments, said immune checkpoint inhibitor is selected from the group consisting of OX40 ligand, ICOS ligand, anti-CD47 antibody or antigen-binding fragment thereof, anti-CD40/CD40L antibody or antigen-binding fragment thereof, anti-Lag3 antibody or antigen-binding fragment thereof, anti-CTLA-4 antibody or antigen-binding fragment thereof, anti-PD-L1 antibody or antigen-binding fragment thereof, anti-PD1 antibody or antigen-binding fragment thereof, and anti-Tim-3 antibody or antigen-binding fragment thereof. In some embodiments, said immune checkpoint inhibitor is an anti-PD-L1 antibody or antigen-binding fragment thereof or an anti-CTLA-4 antibody or antigen-binding fragment thereof. In some embodiments, said immune checkpoint inhibitor is an anti-PD1 antibody or antigen-binding fragment thereof. In some embodiments, said immune checkpoint inhibitor is an anti-CTLA-4 antibody or antigen-binding fragment thereof.

[0585] For example, in some embodiments, provided nucleic acids comprise a transgene encoding an interleukin (IL). In some embodiments, said interleukin is selected from the group consisting of IL-1 alpha, IL-1 beta, IL-2, IL-4, IL-7, IL-10, IL-12 p35, IL-12 p40, IL-12 p70, IL-15, IL-18, IL-21, and IL-23. In some embodiments, said interleukin is selected from the group consisting of IL-12 p35, IL-12 p40, and IL-12 p70. In some embodiments, said interleukin is membrane-bound. In some embodiments, said interleukin is membrane-bound IL-12 p70. In some embodiments, said interleukin is membrane-bound IL-12 p35.

[0586] For example, in some embodiments, provided nucleic acids comprise a transgene encoding a cytokine. In some embodiments, said cytokine is an interferon (IFN). In some embodiments, the interferon is selected from the group consisting of IFN-alpha, IFN-beta, IFN-delta, IFN-epsilon, IFN-tau, IFN-omega, IFN-zeta, and IFN-gamma.

[0587] In some embodiments, the cytokine is a TNF superfamily member protein. In some embodiments, the TNF superfamily member protein is selected from the group consisting of TRAIL, Fas ligand, LIGHT (TNFSF-14), TNF-alpha, and 4-1BB ligand.

[0588] In some embodiments, the cytokine is selected from the group consisting of GM-CSF, Flt3 ligand, CD40 ligand, TGF-beta, VEGF-R2, and c-kit. In some embodiments, the cytokine is Flt3 ligand.

[0589] In some embodiments, said recombinant orthopoxvirus genome comprises a deletion in the B8R gene and at least one transgene is inserted into the deletion in the B8R gene. In some embodiments, at least two transgenes are inserted into the deletion in the B8R gene. In some embodiments, at least three transgenes are inserted into the deletion in the B8R gene. In some embodiments, at least one transgene is inserted in a locus that is not at the deletion in the B8R gene, for example, a locus at the boundary of a deletion at the 5′ end of the orthopoxvirus genome or at a locus at the boundary of a deletion at the 3′ end of the orthopoxvirus genome.

[0590] In one aspect, provided are nucleic acids comprising a recombinant orthopoxvirus genome, wherein said recombinant orthopoxvirus genome comprises (i) a deletion of each of the C2L, C1L, N1L, N2L, M1L, M2L, K1L, K2L, K3L, K4L, K5L, K6L, K7R, F1L, F2L, F3L, B14R, B15R, B16R, B17L, B18R, B19R, B20R, and B8R genes; (ii) a deletion in each copy of the following ITRs: B21R-ITR, B22R-ITR, B23R-ITR, B24R-ITR, B25R-ITR, B26R-ITR, B27R-ITR, B28R-ITR, and B29R-ITR; (iii) an IL-12-TM transgene inserted into the deletion in the B8R gene; (iv) an Flt3 ligand transgene inserted into the deletion in the B8R gene; and (v) one of: (a) a transgene encoding a single chain anti-CTLA-4 antibody or antigen-binding fragment thereof, or (b) (i) a transgene encoding a heavy chain of an anti-CTLA-4 antibody or antigen-binding fragment thereof, and (ii) a transgene encoding a light chain of an anti-CTLA-4 antibody or antigen-binding fragment thereof, wherein the transgene(s) in part (v) is/are inserted within the boundaries of a 5p deletion present in the recombinant orthopoxvirus genome, an wherein the anti-CTLA-4 antibody or antigen-binding fragment thereof is capable of binding CTLA-4.

[0591] In some embodiments, the orthopoxvirus genome is derived from a sequence of SEQ ID NO: 210, wherein (a) said derived sequence comprises a deletion of the B8R gene, and the IL-12-TM transgene, the Flt3 ligand transgene, and the transgene(s) encoding the single or double-chain anti-CTLA-4 antibody; (b) the IL-12-TM transgene encodes a protein comprising an amino acid sequence of is SEQ ID NO: 212; (c) the Flt3 ligand transgene encodes a protein comprising an amino acid sequence of SEQ ID NO: 213; and (d) the anti-CTLA-4 antibody comprises an amino acid sequence of SEQ ID NO: 211.

[0592] In some embodiments of provided nucleic acids, the nucleic acid further comprises a transgene encoding a tumor-associated antigen, for example, a tumor-associated antigen listed in any one of Tables 3-30. In some embodiments, the tumor-associated antigen is a tumor-associated antigen selected from the group consisting of CD19, CD33, EpCAM, CEA, PSMA, EGFRvIII, CD133, EGFR, CDH19, ENPP3, DLL3, MSLN, ROR1, HER2, HLAA2, EpHA2, EpHA3, MCSP, CSPG4, NG2, RON, FLT3, BCMA, CD20, FAPα, FRα, CA-9, PDGFRα, PDGFRβ, FSP1, S100A4, ADAM12m, RET, MET, FGFR, INSR, and NTRK.

[0593] In some embodiments, the tumor-associated antigen comprises MAGE-A3, or one or more fragments thereof.

[0594] In some embodiments, the tumor-associated antigen comprises NY-ESO-1, or one or more fragments thereof.

[0595] In some embodiments, the tumor-associated antigen comprises one or more human papillomavirus (HPV) proteins, or fragments thereof. In some embodiments, the HPV proteins or fragments thereof comprise one or more of (i) E6 and E7 proteins, or fragments thereof, of HPV16 and (ii) E6 and E7 proteins, or fragments thereof, of HPV18. In some embodiments, the sequences of said HPV proteins or fragments are disclosed in International Patent Publication WO/2014/127478, the contents of which are incorporated herein by reference.

[0596] In some embodiments, the tumor-associated antigen comprises brachyury or one or more fragments thereof.

[0597] In some embodiments, the tumor-associated antigen comprises prostatic acid phosphatase, or one or more fragments thereof.

[0598] When more than one transgene described herein is inserted into a recombinant orthopoxvirus genome (e.g., a recombinant vaccinia virus genome), the transgenes can be inserted into one locus or multiple loci (e.g., two loci or three loci). When two or more transgenes described above are inserted into the same loci, the transgenes can be inserted with the same orientation or different orientations relative to one of or both of the flanking endogenous orthopoxvirus genes (e.g., vaccinia virus genes), and also relative to each other. It is also contemplated that, when two or more transgenes are inserted into the same locus, the order of the transgenes inserted into the same locus of the recombinant orthopoxvirus genome (e.g., a recombinant vaccinia virus genome) can be different.

[0599] In certain embodiments of the various embodiments and aspects described herein, the nucleotide sequence encoding the antibody or antigen-binding fragment thereof that specifically binds to CTLA-4 encodes the heavy and light chains of the anti-CTLA-4 antibody (e.g., ipilimumab) separated by cleavage peptide, for example a self-cleavage peptide, e.g., a 2A self-cleaving peptide. In a specific embodiment, the 2A self-cleavage peptide is a T2A peptide. In a particular embodiment, the T2A peptide comprises the amino acid sequence of GSGEGRGSLLTCGDVEENPGP (SEQ ID NO: 570). In a particular embodiment, the T2A peptide comprises the amino acid sequence of PRGSGEGRGSLLTCGDVEENPGP (SEQ ID NO: 571). In another particular embodiment, the T2A peptide comprises the amino acid sequence of EGRGSLLTCGDVEENPGP (SEQ ID NO: 572). In another specific embodiment, the 2A self-cleavage peptide is a P2A peptide. In a particular embodiment, the P2A peptide comprises the amino acid sequence of GSGATNFSLLKQAGDVEENPGP (SEQ ID NO: 573). In another particular embodiment, the P2A peptide comprises the amino acid sequence of ATNFSLLKQAGDVEENPGP (SEQ ID NO: 574). In another specific embodiment, the 2A self-cleavage peptide is a E2A peptide. In a particular embodiment, the E2A peptide comprises the amino acid sequence of GSGQCTNYALLKLAGDVESNPGP (SEQ ID NO: 575). In another particular embodiment, the E2A peptide comprises the amino acid sequence of QCTNYALLKLAGDVESNPGP (SEQ ID NO: 576). In another specific embodiment, the 2A self-cleavage peptide is a F2A peptide. In a particular embodiment, the F2A peptide comprises the amino acid sequence of GSGVKQTLNFDLLKLAGDVESNPGP (SEQ ID NO: 577). In another particular embodiment, the F2A peptide comprises the amino acid sequence of VKQTLNFDLLKLAGDVESNPGP (SEQ ID NO: 578). Linking of the heavy and light chains of the antibody by a 2A self-cleavage peptide enables the antibody transgene to be translated in one open reading frame and self-cleavage to occur co-translationally, resulting in equal amounts of the co-expressed heavy and light chains. In a specific embodiment, the anti-CTLA-4 antibody encoded by a nucleotide sequence described herein comprises the amino acid sequence of SEQ ID NO: 211.

[0600] In various embodiments, the nucleic acid provided herein is a recombinant nucleic acid.

### 5.2.4. Modified Orthopoxviruses

[0601] In one aspect, provided herein is a virus comprising the nucleic acid described in Section 5.2.3. In a specific embodiment, provided herein is a virus comprising the nucleic acid described in Section 5.2.3, wherein the nucleic acid comprises a recombinant vaccinia virus genome that comprises a second transgene comprising a second nucleotide sequence encoding a membrane-bound IL-12 polypeptide.

[0602] In another aspect, provided herein is a virus described in an example in Section 6.

[0603] In another aspect, provided are viruses comprising the nucleic acid comprising the recombinant orthopoxvirus genome described herein. In some embodiments, a) the recombinant orthopoxvirus genome comprises a deletion of at least 2 genes selected from the group consisting of the C2L, C1L, N1L, N2L, M1L, M2L, K1L, K2L, K3L, K4L, K5L, K6L, K7R, F1L, F2L, F3L, B14R, B15R, B16R, B17L, B18R, B19R, and B20R genes; b) said recombinant orthopoxvirus genome comprises a deletion of at least 1 gene selected from the group consisting of the B14R, B15R, B16R, B17L, B18R, B19R, and B20R genes; or c) said recombinant orthopoxvirus genome comprises a deletion of at least 1 gene selected from the group consisting of the C2L, C1L, N1L, N2L, M1L, M2L, K1L, K2L, K3L, K4L, K5L, K6L, K7R, F1L, F2L, and F3L genes.

[0604] In some embodiments, said virus is derived from a vaccinia virus. In some embodiments, said vaccinia virus is derived from a strain selected from the group consisting of Copenhagen, Western Reserve, Wyeth, Lister, EM63, ACAM2000, LC16m8, CV-1, modified vaccinia Ankara (MVA), Dairen I, GLV-1h68, IHD-J, L-IVP, LC16mO, Tashkent, Tian Tan, and WAU86/88-1. In some embodiments, said vaccinia virus is derived from a strain selected from the group consisting of Copenhagen, Western Reserve, Tian Tan, Wyeth, and Lister. In some embodiments, said vaccinia virus is derived from a Copenhagen strain vaccinia virus.

[0605] In some embodiments, said recombinant orthopoxvirus genome further comprises a Thymidine Kinase (TK) gene. In some embodiments, said recombinant orthopoxvirus genome further comprises a ribonucleotide reductase gene.

[0606] In some embodiments of provided viruses, upon contacting a population of cells (e.g., mammalian cells) with said virus, the population of cells (e.g., mammalian cells) exhibit increased syncytia formation relative to a population of cells (e.g., mammalian cells) of the same type contacted with a form of the virus that does not comprise said deletion.

[0607] In some embodiments of provided viruses, upon contacting a population of cells (e.g., mammalian cells) with said virus, the population of cells (e.g., mammalian cells) exhibit increased spreading of the virus relative to a population of cells (e.g., mammalian cells) of the same type contacted with a form of the virus that does not comprise said deletion.

[0608] In some embodiments of provided viruses, said recombinant orthopoxvirus vector exerts an increased cytotoxic effect on a population of cells (e.g., mammalian cells) relative to that of a form of the virus that does not comprise said deletion.

[0609] In some embodiments, said mammalian cells are human cells.

[0610] In some embodiments, said human cells are cancer cells.

[0611] In some embodiments, said mammalian cells are from a cell line selected from the group consisting of U2OS, 293, 293T, Vero, HeLa, A549, BHK, BSC40, CHO, OVCAR-8, 786-0, NCI-H23, U251, SF-295, T-47D, SKMEL2, BT-549, SK-MEL-28, MDA-MB-231, SK-OV-3, MCF7, M14, SF-268, CAKI-1, HPAV, OVCAR-4, HCT15, K-562, and HCT-116.

[0612] In some embodiments of provided viruses, the virus further comprises a transgene encoding a tumor-associated antigen, for example, a tumor-associated antigen listed in any one of Tables 3-30. In some embodiments, the tumor-associated antigen is a tumor-associated antigen selected from the group consisting of CD19, CD33, EpCAM, CEA, PSMA, EGFRvIII, CD133, EGFR, CDH19, ENPP3, DLL3, MSLN, ROR1, HER2, HLAA2, EpHA2, EpHA3, MCSP, CSPG4, NG2, RON, FLT3, BCMA, CD20, FAPα, FRα, CA-9, PDGFRα, PDGFRβ, FSP1, S100A4, ADAM12m, RET, MET, FGFR, INSR, and NTRK.

[0613] In some embodiments, the tumor-associated antigen comprises MAGE-A3, or one or more fragments thereof.

[0614] In some embodiments, the tumor-associated antigen comprises NY-ESO-1, or one or more fragments thereof.

[0615] In some embodiments, the tumor-associated antigen comprises one or more human papillomavirus (HPV) proteins, or fragments thereof. In some embodiments, the HPV proteins or fragments thereof comprise one or more of (i) E6 and E7 proteins, or fragments thereof, of HPV16 and (ii) E6 and E7 proteins, or fragments thereof, of HPV18. In some embodiments, the sequences of said HPV proteins or fragments are disclosed in International Patent Publication WO/2014/127478, the contents of which are incorporated herein by reference.

[0616] In some embodiments, the tumor-associated antigen comprises brachyury or one or more fragments thereof.

[0617] In some embodiments, the tumor-associated antigen comprises prostatic acid phosphatase, or one or more fragments thereof.

[0618] In certain embodiments, the virus provided herein is isolated. In certain embodiments, the virus provided herein is purified.

[0619] In various embodiments, the virus provided herein is a recombinant virus.

[0620] In certain embodiments, the virus provided herein does not cause pox lesion formation when administered to a patient (e.g., a mammalian patient). In certain embodiments, the virus provided herein is able to replicate in vitro and/or when administered to a patient (e.g., a mammalian patient). In certain embodiments, the virus provided herein is able to express the transgene(s) described herein in vitro and/or when administered to a patient (e.g., a mammalian patient). In certain embodiments, the virus provided herein is able to kill target tumor cells (e.g., exhibits cancer cytotoxicity) in vitro and/or when administered to a patient (e.g., a mammalian patient). See the examples in Section 6 for exemplary assays that may be used to determine pox lesion formation, replication, transgene expression, or killing of target tumor cells (e.g., cancer cytotoxicity).

### 5.2.5. Assays for Measuring Virus Characteristics

[0621] In certain embodiments, the viruses described herein have been tested for their ability to replicate/spread, viability, transgene expression, and/or ability to kill target tumor cells (e.g., cancer cytotoxicity), using a method known in the art. See the examples in Section 6 for exemplary assays that may be used to determine replication/spreading, viability, transgene expression, or killing of target tumor cells (e.g., cancer cytotoxicity).

[0622] Assays known in the art to measure the tumor spreading and virulence of a virus include but are not limited to measuring plaque size, syncytia formation, and/or comet assays (EEVs). Assays known in the art to measure the immunostimulatory activity of a virus include but are not limited to NK activation (measured in % CD69 expression), NK degranulation (measured in fold increase of CD107a), and/or T-cell priming assays. Assays known in the art to measure the selectivity of a virus include, but are not limited to, tail pox lesions, biodistribution, and/or body mass measurements.

### 5.2.6. Cells, Cell Lines and Packaging Cell Lines

[0623] In one aspect, provided herein is a cell comprising the nucleic acid described in Section 5.2.3. In another aspect, provided herein is a cell comprising the virus described in Section 5.2.4. In certain embodiments, the cell provided herein is a mammalian cell (e.g., a human cell). In certain embodiments, the cell provided herein is a host cell (e.g., a host cell described in Section 5.4).

[0624] In one aspect, provided herein is a cell line comprising the nucleic acid described in Section 5.2.3. In another aspect, provided herein is a cell line comprising the virus described in Section 5.2.4. In certain embodiments, the cell line provided herein is a mammalian cell line (e.g., a human cell line).

[0625] In one aspect, provided herein is a packaging cell line comprising the nucleic acid described in Section 5.2.3. In another aspect, provided herein is a packaging cell line comprising the virus described in Section 5.2.4. The packaging cell line can be any cell line suitable for packaging orthopoxvirus viruses (e.g., vaccinia viruses). In certain embodiments, the packaging cell line provided herein is a mammalian packaging cell line (e.g., a human packaging cell line).

[0626] Exemplary cells that can be used to culture a virus described herein include, for example, the HeLa cells, U2OS cells, 293T cells, NIH3T3 cells, Jurkat cells, 293 cells, COS cells, CHO cells, Saos cells, PC12 cells, and chicken embryo fibroblasts (CEF). Exemplary packaging cell lines that can be used to package a virus described herein include, for example, the HeLa cell line, the U2-OS cell line, the HEK293T cell line, the 786-O cell line, the A549 cell line or an adherent human cancer cell line. In certain embodiments, the cells also express or are engineered to express one or more factors necessary for the replication and/or packaging of the vaccinia virus.

[0627] In certain embodiments, the cell, cell line, or the packaging cell line provided herein is a cell, cell line or packaging cell line described in an example in Section 6.

### 5.2.7 Examples of Proteins Encoded by Orthopoxvirus Genes

[0628] Exemplary proteins encoded by orthopoxvirus genes described in this disclosure are reproduced in Tables 31-40 below. As used below, the term “location” refers to the location of the gene with respect to the deleted nucleic acids in exemplary orthopoxvirus vectors described herein. For various genes, amino acid sequence information and protein accession ID numbers are provided.

### 5.3. Methods of Genetic Modification

[0629] Methods for the insertion or deletion of nucleic acids from a target genome include those described herein and known in the art. Methods for nucleic acid delivery to effect expression of compositions of the present invention are believed to include virtually any method by which a nucleic acid (e.g., DNA, including viral and non-viral vectors) can be introduced into an organelle, a cell, a tissue or an organism, as described herein or as would be known to one of ordinary skill in the art. Such methods include, but are not limited to, direct delivery of DNA such as by injection (U.S. Pat. Nos. 5,994,624, 5,981,274, 5,945,100, 5,780,448, 5,736,524, 5,702,932, 5,656,610, 5,589,466 and 5,580,859, each incorporated herein by reference), including microinjection (Harland and Weintraub, 1985; U.S. Pat. No. 5,789,215, incorporated herein by reference); by electroporation (U.S. Pat. No. 5,384,253, incorporated herein by reference); by calcium phosphate precipitation (Graham and Van Der Eb, 1973; Chen and Okayama, 1987; Rippe et al., 1990); by using DEAE-dextran followed by polyethylene glycol (Gopal, 1985); by direct sonic loading (Fechheimer et al., 1987); by liposome mediated transfection (Nicolau and Sene, 1982; Fraley et al., 1979; Nicolau et al., 1987; Wong et al., 1980; Kaneda et al., 1989; Kato et al., 1991); by microprojectile bombardment (PCT Application Nos. WO 94/09699 and 95/06128; U.S. Pat. Nos. 5,610,042; 5,322,783, 5,563,055, 5,550,318, 5,538,877 and 5,538,880, and each incorporated herein by reference); by agitation with silicon carbide fibers (Kaeppler et al., 1990; U.S. Pat. Nos. 5,302,523 and 5,464,765, each incorporated herein by reference); by Agrobacterium-mediated transformation (U.S. Pat. Nos. 5,591,616 and 5,563,055, each incorporated herein by reference); or by PEG-mediated transformation of protoplasts (Omirulleh et al., 1993; U.S. Pat. Nos. 4,684,611 and 4,952,500, each incorporated herein by reference); by desiccation/inhibition-mediated DNA uptake (Potrykus et al., 1985). Through the application of techniques such as these, organelle(s), cell(s), tissue(s) or organism(s) may be stably or transiently transformed.

[0630] Depicted below are clusters of deleted genes and their function in CopMD5p, CopMD3p, and CopMD5p3p virus. ITR genes (designated in Table 2 by “-ITR” and “*”) are deleted in one copy, the right ITR of the genome. However, these genes have a second copy in the left ITR, which remains intact in these virus. Deletions were confirmed by whole genome sequencing. Most of the deleted genes are either involved in blocking host response to viral infection or have an unknown function.

TABLE 2
Deleted genes in Vaccinia viruses

| Name | Category | Function | Virus Deletions | |
|---|---|---|---|---|
| C2L | Host | Inhibits NFkB | CopMD5p | CopMD5p3p |
| | interaction | | | |
| C1L | Unknown | Unknown | | |
| N1L | Host | Inhibits NFkB and | | |
| | interaction | Apoptosis | | |
| N2L | Host | Inhibits IRF3 | | |
| | interaction | | | |
| M1L | Unknown | Unknown | | |
| M2L | Host | Inhibits NFkB and | | |
| | interaction | Apoptosis | | |
| K1L | Host | Inhibits PKR and | | |
| | interaction | NF-kB | | |
| K2L | Host | Prevents cell fusion | | |
| | interaction | | | |
| K3L | Host | Inhibits PKR | | |
| | interaction | | | |
| K4L | DNA | DNA modifying | | |
| | replication | nuclease | | |
| K5L | Pseudogene | Pseudogene | | |
| K6L | Pseudogene | Pseudogene | | |
| K7R | Host | Inhibits NFkB and | | |
| | interaction | IRF3 | | |
| F1L | Host | Inhibits Apoptosis | | |
| | interaction | | | |
| F2L | DNA | Deoxyuridine | | |
| | replication | triphosphatase | | |
| F3L | Host | Virulence factor | | |
| | interaction | | | |
| B14R | Pseudogene | Pseudogene | CopMD3p | |
| B15R | Unknown | Unknown | | |
| B16R | Host | IL-1-beta-inhibitor | | |
| | interaction | | | |
| B17L | Unknown | Unknown | | |
| B18R | Unknown | Ankyrin-like | | |
| B19R | Host | Secreted IFNα | | |
| | interaction | sequestor | | |
| B20R | Unknown | Ankyrin-like | | |
| B21R- | Unknown | Unknown | | |
| ITR* | | | | |
| B22R- | Unknown | Unknown | | |
| ITR* | | | | |
| B23R- | Unknown | Unknown | | |
| ITR* | | | | |
| B24R- | Unknown | Unknown | | |
| ITR* | | | | |
| B25R- | Unknown | Unknown | | |
| ITR* | | | | |
| B26R- | Unknown | Unknown | | |
| ITR* | | | | |
| B27R- | Unknown | Unknown | | |
| ITR* | | | | |
| B28R- | Pseudogene | TNF-a receptor | | |
| ITR* | | | | |
| B29R- | Host | Secreted CC- | | |
| ITR* | interaction | chemokine | | |
| | | sequestor | | |

[0631] In various embodiments, the orthopox viruses are further genetically modified to contain deletions in the B8R gene. The vaccinia virus B8R gene encodes a secreted protein with homology to gamma interferon receptor (IFN-γ). In vitro, the B8R protein binds to and neutralizes the antiviral activity of several species of gamma interferon including human and rat gamma interferon; it does not, however, bind significantly to murine IFN-γ. Deleting the B8R gene prevents the impairment of IFN-γ in humans. In various embodiments, one, two or three transgenes are inserted into the locus of the deleted B8R gene. In some strains, in addition to the transgene(s) present at the site of the B8R deletion, the strain also has, at least one transgene is inserted into an additional locus on the orthopox virus that is not the locus of the deleted B8R gene. In various embodiments, at least one transgene is inserted into boundaries of the 5p deletions, at least one transgene is inserted into the boundaries of the 3p deletions or both. In various, embodiments at least three, four, five or more transgenes are inserted into the modified orthopox virus genome.

[0632] In various embodiments, the sequence of the modified orthopoxvirus vector is the sequence depicted below in Table 43 as SEQ ID NO: 210. In some embodiments, the sequence of the modified orthopoxvirus vector is a derivative of SEQ ID NO: 210. For example, as noted herein, the modified orthopoxvirus vector may be modified to express one or more transgenes as discussed herein.

[0633] In various embodiments, the sequence of the modified orthopoxvirus vector is the sequence depicted below in Table 43 as SEQ ID NO: 624. In some embodiments, the sequence of the modified orthopoxvirus vector is a derivative of SEQ ID NO: 624. For example, as noted herein, the modified orthopoxvirus vector may contain a deletion of the B8R sequence and/or may be modified to express one or more transgenes as discussed herein.

[0634] In various embodiments, the modified orthopoxvirus expresses at least one of three transgenes: IL-12-TM, FLT3-L and anti-CLTA4 antibody. Non-limiting examples of sequences of these transgenes and/or of amino acid sequences encoded by them are described below:

Full-length anti-human CTLA-4 antibody (full-length
antibody comprising ipilimumab heavy and light chains
with T2A intervening the heavy and light chains

| Nucleotide | ATGGAAACAGACACCCTATTATTATGGGTTTTGCTTCTATGGGTGCCAGGATCT |
|---|---|
| SEQ ID | ACGGGTCAGGTTCAGCTAGTCGAATCGGGTGGAGGAGTCGTGCAGCCGGGACGT |
| NO: 214 | TCCTTACGTTTATCTTGCGCAGCGTCTGGTTTTACTTTCTCGTCCTACACTATG |
| | CATTGGGTTCGTCAGGCTCCGGGAAAGGGATTGGAGTGGGTAACATTTATAAGT |
| | TACGACGGTAATAATAAATACTATGCAGACAGTGTGAAGGGACGTTTCACTATA |
| | TCTCGAGATAATAGTAAGAACACTTTGTATTTGCAGATGAATTCATTGAGAGCG |
| | GAAGATACAGCAATTTACTACTGCGCCAGAACCGGATGGTTGGGTCCCTTTGAC |
| | TATTGGGGACAGGGTACTCTTGTTACGGTGTCTTCTGCTTCAACAAAGGGTCCC |
| | TCTGTCTTCCCGCTTGCGCCCTCATCAAAATCGACGTCGGGTGGAACCGCTGCC |
| | TTGGGATGCTTGGTTAAGGACTATTTCCCCGAACCTGTCACCGTGTCTTGGAAT |
| | TCCGGTGCTCTAACGTCTGGTGTGCACACTTTCCCTGCCGTTTTACAAAGTTCC |
| | GGACTATATTCACTTTCGTCCGTAGTAACTGTTCCAAGTTCGTCCCTTGGAACA |
| | CAGACCTATATATGCAACGTAAACCACAAACCCTCCAATACCAAAGTCGATAAA |
| | AGAGTTGAGCCTAAATCCTGCGACAAAACACACACCTGCCCACCTTGCCCGGCC |
| | CCTGAACTTCTTGGAGGACCATCTGTATTCCTTTTCCCACCGAAGCCTAAGGAC |
| | ACCTTGATGATATCCAGAACTCCCGAAGTCACGTGCGTAGTAGTCGATGTGAGT |
| | CACGAAGATCCGGAAGTCAAGTTTAACTGGTATGTAGACGGAGTAGAGGTTCAT |
| | AACGCCAAGACCAAGCCAAGAGAAGAACAATATAACTCGACTTACAGAGTCGTG |
| | TCTGTATTAACCGTCTTGCATCAGGACTGGTTAAACGGTAAAGAGTACAAGTGC |
| | AAGGTCTCCAATAAAGCCCTACCTGCCCCCATCGAAAAAACCATATCCAAGGCT |
| | AAGGGTCAGCCTAGAGAACCTCAAGTTTACACATTACCGCCCAGTAGAGATGAA |
| | CTTACGAAGAATCAAGTGAGTCTAACCTGCCTTGTTAAAGGATTCTACCCCAGT |
| | GACATAGCGGTGGAGTGGGAGTCCAACGGTCAACCCGAGAACAATTATAAGACG |
| | ACACCGCCCGTTCTTGACAGTGACGGATCGTTCTTTCTATACTCTAAGTTGACT |
| | GTGGATAAATCCCGATGGCAGCAGGGAAACGTATTCTCTTGCTCAGTGATGCAT |
| | GAGGCGTTGCACAATCATTACACCCAAAAGTCTTTGTCGCTAAGTCCAGGTAAA |
| | CCGCGGGGCAGCGGAGAGGGCAGAGGAAGCCTGCTGACTTGTGGCGATGTGGAA |
| | GAGAACCCTGGCCCTAAGCTTATGGCTTGGACACCAGGAATCTTCATGGTACTT |
| | AGTTACTTGACAGGATCTTTCTCGGAAATAGTCTTAACTCAGTCACCGGGTACA |
| | CTTTCCCTTTCGCCCGGAGAGCGTGCGACCCTATCGTGTCGAGCTTCCCAGTCG |
| | GTTGGTTCTTCGTATCTTGCTTGGTATCAGCAGAAGCCCGGACAAGCTCCTCGT |
| | CTTTTGATCTACGGTGCGTTTTCGAGAGCGACTGGTATCCCGGATAGATTTTCT |
| | GGATCGGGTTCTGGTACTGATTTCACTTTAACGATTTCGAGACTAGAGCCCGAA |
| | GATTTTGCTGTGTATTATTGCCAGCAATATGGATCTAGTCCGTGGACGTTCGGT |
| | CAGGGTACCAAGGTCGAGATAAAAAGAACTGTGGCCGCACCCTCCGTGTTTATC |
| | TTTCCCCCTTCCGACGAACAGCTAAAGTCGGGTACTGCATCGGTGGTATGTTTA |
| | CTTAACAACTTTTACCCACGAGAGGCCAAGGTACAATGGAAGGTGGATAACGCC |
| | TTACAATCAGGAAACTCACAAGAGTCCGTCACCGAGCAAGATTCCAAGGACAGT |
| | ACATACTCGTTATCCTCGACATTAACATTGAGTAAGGCGGATTATGAGAAGCAT |
| | AAGGTTTACGCATGCGAAGTGACGCACCAAGGACTTTCATCCCCCGTCACCAAG |
| | TCTTTCAATCGTGGTGAGTGCTGA |
| Amino | METDTLLLWVLLLWVPGSTGQVQLVESGGGVVQPGRSLRLSCAASGFTFSSYTM |
| acid | HWVRQAPGKGLEWVTFISYDGNNKYYADSVKGRFTISRDNSKNTLYLQMNSLRA |
| SEQ ID | EDTAIYYCARTGWLGPFDYWGQGTLVTVSSASTKGPSVFPLAPSSKSTSGGTAA |
| NO: 211 | LGCLVKDYFPEPVTVSWNSGALTSGVHTFPAVLQSSGLYSLSSVVTVPSSSLGT |
| | QTYICNVNHKPSNTKVDKRVEPKSCDKTHTCPPCPAPELLGGPSVFLFPPKPKD |
| | TLMISRTPEVTCVVVDVSHEDPEVKFNWYVDGVEVHNAKTKPREEQYNSTYRVV |
| | SVLTVLHQDWLNGKEYKCKVSNKALPAPIEKTISKAKGQPREPQVYTLPPSRDE |
| | LTKNQVSLTCLVKGFYPSDIAVEWESNGQPENNYKTTPPVLDSDGSFFLYSKLT |
| | VDKSRWQQGNVFSCSVMHEALHNHYTQKSLSLSPGKPRGSGEGRGSLLTCGDVE |
| | ****************** |
| | ENPGPKLMAWTPGIFMVLSYLTGSFSEIVLTQSPGTLSLSPGERATLSCRASQS |
| | ***** |
| | VGSSYLAWYQQKPGQAPRLLIYGAFSRATGIPDRFSGSGSGTDFTLTISRLEPE |
| | DFAVYYCQQYGSSPWTFGQGTKVEIKRTVAAPSVFIFPPSDEQLKSGTASVVCL |
| | LNNFYPREAKVQWKVDNALQSGNSQESVTEQDSKDSTYSLSSTLTLSKADYEKH |
| | KVYACEVTHQGLSSPVTKSFNRGEC |
| | (italicized: signal peptide sequence; sequence having |
| | * beneath the letters: T2A sequence (includinGa PRGSG |
| | (SEQ ID NO: 589) linker); bold: heavy chain sequence; |
| | bold and underlined: lighTchain sequence) |
| Heavy | QVQLVESGGGVVQPGRSLRLSCAASGFTFSSYTMHWVRQAPGKGLEWVTFISYD |
| chain | GNNKYYADSVKGRFTISRDNSKNTLYLQMNSLRAEDTAIYYCARTGWLGPFDYW |
| (amino | GQGTLVTVSSASTKGPSVFPLAPSSKSTSGGTAALGCLVKDYFPEPVTVSWNSG |
| acid) | ALTSGVHTFPAVLQSSGLYSLSSVVTVPSSSLGTQTYICNVNHKPSNTKVDKRV |
| (SEQ ID | EPKSCDKTHTCPPCPAPELLGGPSVFLFPPKPKDTLMISRTPEVTCVVVDVSHE |
| NO: 217) | DPEVKFNWYVDGVEVHNAKTKPREEQYNSTYRVVSVLTVLHQDWLNGKEYKCKV |
| | SNKALPAPIEKTISKAKGQPREPQVYTLPPSRDELTKNQVSLTCLVKGFYPSDI |
| | AVEWESNGQPENNYKTTPPVLDSDGSFFLYSKLTVDKSRWQQGNVFSCSVMHEA |
| | LHNHYTQKSLSLSPGKPRGSGEGRGSLLTCGDVEENPG |
| Light chain | EIVLTQSPGTLSLSPGERATLSCRASQSVGSSYLAWYQQKPGQAPRLLIYGAFS |
| (amino | RATGIPDRFSGSGSGTDFTLTISRLEPEDFAVYYCQQYGSSPWTFGQGTKVEIK |
| acid) (SEQ | RTVAAPSVFIFPPSDEQLKSGTASVVCLLNNFYPREAKVQWKVDNALQSGNSQE |
| ID NO: | SVTEQDSKDSTYSLSSTLTLSKADYEKHKVYACEVTHQGLSSPVTKSFNRGEC |
| 218) | |

Anti-CTLA-4 (human single chain)

| | |
|---|---|
| Nucleotide | ATGGAGACAGATACTCTATTGCTATGGGTTTTGTTATTATGGGTGCCGGGTTCC |
| SEQ ID | ACGGGAATTCGTCGTGCTGACATTGTTTTAACACAGTCTCCAGGTACCCTATCA |
| NO: 579 | TTGTCCCCTGGTGAGCGTGCCACGCTTAGTTGCAGAGCCTCTCAGTCTGTGGGA |
| | TCAAGTTATTTAGCTTGGTATCAACAAAAACCTGGACAAGCACCTCGTTTGTTA |
| | ATATATGGTGCATTCAGTAGAGCAACTGGAATTCCTGATCGATTCTCAGGATCT |
| | GGATCTGGAACAGACTTCACACTTACCATCTCACGTCTTGAACCCGAGGACTTT |
| | GCGGTCTACTACTGCCAGCAGTATGGTTCGTCGCCTTGGACTTTCGGACAAGGA |
| | ACCAAAGTTGAAATCAAGCGAGGAGGAGGTGGATCGGGTGGTGGAGGATCCGGT |
| | GGAGGTGGAAGTGAAGCGAAGCTAGTCGAATCTGGAGGTGGTGTAGTGCAGCCT |
| | GGACGTTCGCTTCGACTATCCTGTGCTGCTTCAGGATTTACCTTTTCATCTTAC |
| | ACGATGCACTGGGTGCGTCAAGCGCCTGGTAAAGGACTAGAGTGGGTCACGTTT |
| | ATCTCATACGACGGTAATAACAAGTATTATGCTGATTCCGTAAAGGGACGTTTC |
| | ACCATATCGCGTGACAATTCTAAGAATACCTTGTATCTTCAAATGAATAGTCTT |
| | AGAGCTGAAGACACTGCCATTTACTATTGTGCACGAACGGGATGGCTTGGACCT |
| | TTTGATTATTGGGGTCAGGGTACTTTGGTCACCGTCTCCACAGCGAAGACAACA |
| | CCTCCCTCAGTCTATCCACTTGCTCCGCGTAGTTAA |
| Amino | METDTLLLWVLLLWVPGSTGIRRADIVLTQSPGTLSLSPGERATLSCRASQSVG |
| acid | SSYLAWYQQKPGQAPRLLIYGAFSRATGIPDRFSGSGSGTDFTLTISRLEPEDF |
| SEQ ID | AVYYCQQYGSSPWTFGQGTKVEIKRGGGGSGGGGSGGGGSEAKLVESGGGVVQP |
| NO: 580 | GRSLRLSCAASGFTFSSYTMHWVRQAPGKGLEWVTFISYDGNNKYYADSVKGRF |
| | TISRDNSKNTLYLQMNSLRAEDTAIYYCARTGWLGPFDYWGQGTLVTVSTAKTT |
| | PPSVYPLAPRS |

Anti-CTLA-4 (mouse single chain)

| | |
|---|---|
| Nucleotide | ATGGAAACCGATACTTTGCTTCTATGGGTCCTTTTGCTATGGGTGCCCGGATCA |
| SEQ ID | ACCGGAATAAGACGTGCTGATATCGTTATGACCCAGACCACGCTATCATTACCA |
| NO: 581 | GTTAGTCTAGGTGACCAGGCCAGTATCAGTTGCCGTTCATCTCAGTCCATTGTA |
| | CACTCAAACGGAAACACCTACTTGGAGTGGTATCTTCAGAAACCTGGTCAATCT |
| | CCCAAGCTTCTAATTTACAAAGTGTCTAACCGATTTTCTGGTGTGCCGGATCGA |
| | TTTTCGGGTTCTGGTAGTGGAACGGATTTCACGCTAAAAATATCCCGAGTCGAA |
| | GCTGAAGACCTAGGAGTATATTATTGCTTTCAAGGATCTCACGTCCCGTACACC |
| | TTTGGTGGAGGAACCAAGCTTGAAATAAAGCGAGGAGGTGGAGGATCAGGAGGA |
| | GGTGGTTCGGGTGGTGGTGGTTCCGAGGCGAAGTTACAGGAGTCGGGACCCGTA |
| | TTAGTGAAGCCTGGTGCGAGTGTCAAAATGAGTTGCAAAGCCAGTGGTTACACC |
| | TTCACAGACTATTACATGAACTGGGTGAAGCAGTCTCACGGAAAATCTTTAGAG |
| | TGGATAGGAGTAATTAACCCGTACAATGGTGATACGAGTTACAACCAGAAGTTC |
| | AAAGGTAAGGCGACCTTGACGGTCGATAAATCCTCTAGTACTGCGTACATGGAA |
| | CTAAACTCTTTAACCTCTGAGGATTCTGCCGTATATTATTGTGCCAGATATTAT |
| | GGTTCGTGGTTCGCATATTGGGGACAGGGAACTTTAATTACGGTCTCGACAGCC |
| | AAAACGACTCCCCCCTCAGTTTATCCCCTTGCTCCTAGAAGTTAA |
| Amino | METDTLLLWVLLLWVPGSTGIRRADIVMTQTTLSLPVSLGDQASISCRSSQSIV |
| acid | HSNGNTYLEWYLQKPGQSPKLLIYKVSNRFSGVPDRFSGSGSGTDFTLKISRVE |
| SEQ ID | AEDLGVYYCFQGSHVPYTFGGGTKLEIKRGGGGSGGGGSGGGGSEAKLQESGPV |
| NO: 582 | LVKPGASVKMSCKASGYTFTDYYMNWVKQSHGKSLEWIGVINPYNGDTSYNQKF |
| | KGKATLTVDKSSSTAYMELNSLTSEDSAVYYCARYYGSWFAYWGQGTLITVSTA |
| | KTTPPSVYPLAPRS |

Human IL-12 TM p35

| | |
|---|---|
| Nucleotide | ATGTGTCCCGCGCGATCGTTATTGTTAGTTGCGACGTTGGTCCTACTTGACCAT |
| SEQ ID | CTATCACTAGCGCGTAATTTGCCCGTTGCCACACCAGATCCCGGAATGTTTCCT |
| NO: 215 | TGCTTACATCATAGTCAGAACTTACTTCGTGCAGTCTCCAACATGTTACAGAAA |
| | GCCCGACAGACCTTAGAGTTCTATCCCTGTACTTCCGAAGAGATAGATCACGAG |
| | GACATAACGAAAGACAAAACATCGACCGTTGAAGCGTGCTTACCCTTAGAACTA |
| | ACCAAAAATGAAAGTTGTCTAAACTCTAGAGAAACGAGTTTTATCACCAATGGA |
| | AGTTGCTTGGCGTCTAGAAAAACATCATTTATGATGGCCTTGTGTCTTTCCTCC |
| | ATATACGAGGACTTGAAGATGTATCAGGTCGAGTTCAAGACAATGAACGCGAAA |
| | TTGCTTATGGACCCCAAACGACAGATATTTTTGGACCAAAACATGTTAGCTGTT |
| | ATAGACGAATTGATGCAGGCGCTAAACTTCAATTCGGAAACTGTGCCACAGAAG |
| | TCATCCTTAGAGGAGCCCGATTTTTACAAGACAAAAATCAAGTTATGCATTCTT |
| | CTTCACGCGTTTAGAATTCGTGCCGTTACGATTGATAGAGTAATGTCGTACTTG |
| | AATGCGTCGGGTGGAGGAGGTTCCGGAGGAGGAGGATCCGGAGGAGGTGGATCC |
| | TTACTTCCTTCGTGGGCTATAACATTAATCTCCGTTAATGGTATCTTCGTGATT |
| | TGCTGTCTAACATACTGCTTTGCATGA |
| | (Underlined and bold: B7-1 transmembrane domain; |
| | Bold: B7-1 cytoplasmic domain.) |
| Amino | MCPARSLLLVATLVLLDHLSLARNLPVATPDPGMFPCLHHSQNLLRAVSNMLQK |
| acid: SEQ | ARQTLEFYPCTSEEIDHEDITKDKTSTVEACLPLELTKNESCLNSRETSFITNG |
| ID NO: | SCLASRKTSFMMALCLSSIYEDLKMYQVEFKTMNAKLLMDPKRQIFLDQNMLAV |
| 212 | IDELMQALNFNSETVPQKSSLEEPDFYKTKIKLCILLHAFRIRAVTIDRVMSYL |
| | NASGGGGSGGGGSGGGGSLLPSWAITLISVNGIFVICCLTYCFA |
| | (Underlined and bold: B7-1 transmembrane domain; |
| | Bold: B7-1 cytoplasmic domain.) |

Human IL-12 TM p70

| | |
|---|---|
| Nucleotide | ATGTGTCACCAGCAGTTGGTCATCTCTTGGTTTTCCCTGGTTTTTCTGGCATCT |
| SEQ ID | CCCCTCGTGGCCATATGGGAACTGAAGAAAGATGTTTATGTCGTAGAATTGGAT |
| NO: 583 | TGGTATCCGGATGCCCCTGGAGAAATGGTGGTCCTCACCTGTGACACCCCTGAA |
| | GAAGATGGTATCACCTGGACCTTGGACCAGAGCAGTGAGGTCTTAGGCTCTGGC |
| | AAAACCCTGACCATCCAAGTCAAAGAGTTTGGAGATGCTGGCCAGTACACCTGT |
| | CACAAAGGAGGCGAGGTTCTAAGCCATTCGCTCCTGCTGCTTCACAAAAAGGAA |
| | GATGGAATTTGGTCCACTGATATTTTAAAGGACCAGAAAGAACCCAAAAATAAG |
| | ACCTTTCTAAGATGCGAGGCCAAGAATTATTCTGGACGTTTCACCTGCTGGTGG |
| | CTGACGACAATCAGTACTGATTTGACATTCAGTGTCAAAAGCAGCAGAGGCTCT |
| | TCTGACCCCCAAGGGGTGACGTGCGGAGCTGCTACACTCTCTGCAGAGAGAGTC |
| | AGAGGGGACAACAAGGAGTATGAGTACTCAGTGGAGTGCCAGGAGGACAGTGCC |
| | TGCCCAGCTGCTGAGGAGAGTCTGCCCATTGAGGTCATGGTGGATGCCGTTCAC |
| | AAGCTCAAGTATGAAAACTACACCAGCAGCTTCTTCATCAGGGACATCATCAAA |
| | CCTGACCCACCCAAGAACTTGCAGCTGAAGCCATTAAAGAATTCTCGGCAGGTG |
| | GAGGTCAGCTGGGAGTACCCTGACACCTGGAGTACTCCACATTCCTACTTCTCC |
| | CTGACATTCTGCGTTCAGGTCCAGGGCAAGAGCAAGAGAGAAAAGAAAGATAGA |
| | GTCTTCACGGACAAGACCTCAGCCACGGTCATCTGCCGCAAAAATGCCAGCATT |
| | AGCGTGCGGGCCCAGGACCGCTACTATAGCTCATCTTGGAGCGAATGGGCATCT |
| | GTGCCCTGCAGTGTTCCTGGAGTAGGGGTACCTGGGGTGGGCGCCAGAAACCTC |
| | CCCGTGGCCACTCCAGACCCAGGAATGTTCCCATGCCTTCACCACTCCCAAAAC |
| | CTGCTGAGGGCCGTCAGCAACATGCTCCAGAAGGCCAGACAAACTCTAGAATTT |
| | TACCCTTGCACTTCTGAAGAGATTGATCATGAAGATATCACAAAAGATAAAACC |
| | AGCACAGTGGAGGCCTGTTTACCATTGGAATTAACCAAGAATGAGAGTTGCCTA |
| | AATTCCAGAGAGACCTCTTTCATAACTAATGGGAGTTGCCTGGCCTCCAGAAAG |
| | ACCTCTTTTATGATGGCCCTGTGCCTTAGTAGTATTTATGAAGACTTGAAGATG |
| | TACCAGGTGGAGTTCAAGACCATGAATGCAAAGCTGCTGATGGACCCTAAGAGG |
| | CAGATCTTTCTAGATCAAAACATGCTGGCAGTTATTGATGAGCTGATGCAGGCC |
| | CTGAATTTCAACAGTGAGACTGTGCCACAAAAATCCTCCCTTGAAGAACCGGAT |
| | TTTTATAAAACTAAAATCAAGCTCTGCATACTTCTTCATGCTTTCAGAATTCGG |
| | GCAGTGACTATTGATAGAGTGATGAGCTATCTGAATGCTTCCGGAGGAGGTGGA |
| | TCGGGTGGTGGAGGATCTGGTGGAGGTGGAAGTCTGCTCCCATCCTGGGCCATT |
| | ACCTTAATCTCAGTAAATGGAATTTTTGTGATATGCTGCCTGACCTACTGCTTT |
| | GCCTAA |
| | (Underlined and bold: B7-1 transmembrane domain; |
| | Bold: B7-1 cytoplasmic domain.) |
| Amino | MCHQQLVISWFSLVFLASPLVAIWELKKDVYVVELDWYPDAPGEMVVLTCDTPE |
| acid: SEQ | EDGITWTLDQSSEVLGSGKTLTIQVKEFGDAGQYTCHKGGEVLSHSLLLLHKKE |
| ID NO: | DGIWSTDILKDQKEPKNKTFLRCEAKNYSGRFTCWWLTTISTDLTFSVKSSRGS |
| 584 | SDPQGVTCGAATLSAERVRGDNKEYEYSVECQEDSACPAAEESLPIEVMVDAVH |
| | KLKYENYTSSFFIRDIIKPDPPKNLQLKPLKNSRQVEVSWEYPDTWSTPHSYFS |
| | LTFCVQVQGKSKREKKDRVFTDKTSATVICRKNASISVRAQDRYYSSSWSEWAS |
| | VPCSVPGVGVPGVGARNLPVATPDPGMFPCLHHSQNLLRAVSNMLQKARQTLEF |
| | YPCTSEEIDHEDITKDKTSTVEACLPLELTKNESCLNSRETSFITNGSCLASRK |
| | TSFMMALCLSSIYEDLKMYQVEFKTMNAKLLMDPKRQIFLDQNMLAVIDELMQA |
| | LNFNSETVPQKSSLEEPDFYKTKIKLCILLHAFRIRAVTIDRVMSYLNASGGGG |
| | SGGGGSGGGGSLLPSWAITLISVNGIFVICCLTYCFA |
| | (Underlined and bold: B7-1 transmembrane domain; |
| | Bold: B7-1 cytoplasmic domain.) |

Mouse IL-12 TM p35

| | |
|---|---|
| Nucleotide | ATGTGTCAGTCTCGATACCTTCTTTTCCTAGCAACCTTAGCGTTATTGAATCAT |
| SEQ ID | CTTTCATTAGCGCGTGTCATTCCGGTCTCCGGTCCCGCCCGTTGCCTTTCGCAA |
| NO: 585 | AGTCGTAACTTGCTTAAGACTACGGATGATATGGTCAAAACTGCTAGAGAAAAG |
| | TTAAAACACTACTCGTGTACGGCTGAAGACATAGACCACGAAGACATCACGCGA |
| | GATCAAACAAGTACCCTAAAGACTTGCTTACCGCTAGAGCTTCATAAAAACGAG |
| | AGTTGCCTAGCGACCCGAGAGACATCTTCAACAACCAGAGGATCTTGTCTACCC |
| | CCTCAGAAGACTTCTCTAATGATGACCTTGTGCCTTGGTAGTATATATGAAGAT |
| | TTAAAGATGTACCAGACTGAATTTCAGGCAATCAATGCGGCATTACAAAACCAC |
| | AACCATCAGCAGATAATATTAGATAAAGGAATGCTTGTAGCCATTGACGAACTT |
| | ATGCAGTCTCTAAACCACAACGGTGAGACACTTCGTCAGAAACCTCCGGTTGGT |
| | GAGGCAGATCCTTACCGTGTGAAAATGAAGTTGTGCATTCTATTGCATGCATTT |
| | TCGACGCGTGTGGTCACCATCAACAGAGTCATGGGTTATCTAAGTTCTGCTGGT |
| | GGAGGTGGAAGTGGAGGTGGAGGAAGTGGTGGAGGAGGAAGTACCTTAGTGTTG |
| | TTTGGAGCAGGTTTCGGTGCAGTCATAACGGTTGTCGTTATCGTGGTGATCATA |
| | AAATGTTTCTGCAAGTGA |
| | (Underlined and bold: transmembrane and cytoplasmic |
| | domain.) |
| Amino | MCQSRYLLFLATLALLNHLSLARVIPVSGPARCLSQSRNLLKTTDDMVKTAREK |
| acid: SEQ | LKHYSCTAEDIDHEDITRDQTSTLKTCLPLELHKNESCLATRETSSTTRGSCLP |
| ID NO: | PQKTSLMMTLCLGSIYEDLKMYQTEFQAINAALQNHNHQQIILDKGMLVAIDEL |
| 586 | MQSLNHNGETLRQKPPVGEADPYRVKMKLCILLHAFSTRVVTINRVMGYLSSAG |
| | GGGSGGGGSGGGGSTLVLFGAGFGAVITVVVIVVIIKCFCK |
| | (Underlined and bold: transmembrane and cytoplasmic |
| | domain.) |

Mouse IL-12 TM p70

| | |
|---|---|
| Nucleotide | ATGTGCCCCCAAAAGTTGACCATCTCATGGTTCGCAATTGTACTACTAGTGAGT |
| SEQ ID | CCCTTGATGGCAATGTGGGAGCTTGAAAAGGACGTCTATGTGGTGGAGGTTGAC |
| NO: 587 | TGGACGCCCGATGCGCCAGGAGAAACAGTGAATCTAACTTGCGACACACCTGAA |
| | GAGGATGACATAACGTGGACATCTGATCAAAGACATGGTGTGATAGGTTCTGGT |
| | AAGACACTTACGATTACCGTCAAGGAATTTTTGGACGCTGGACAATACACTTGT |
| | CACAAAGGAGGTGAAACACTATCGCATTCACACCTACTTTTACACAAGAAGGAA |
| | AATGGTATTTGGAGTACGGAGATCCTAAAGAATTTTAAAAATAAGACCTTTTTA |
| | AAGTGCGAAGCACCAAATTATTCCGGACGATTTACATGTTCATGGTTAGTTCAA |
| | CGAAATATGGATTTAAAATTCAATATCAAGTCAAGTTCTAGTTCCCCGGATTCC |
| | CGAGCGGTTACTTGCGGTATGGCCAGTTTGAGTGCCGAGAAAGTCACACTAGAC |
| | CAGCGAGATTATGAGAAATATTCCGTTTCCTGCCAGGAGGACGTAACTTGTCCG |
| | ACTGCCGAGGAGACTTTGCCGATAGAGCTTGCCTTAGAGGCCCGACAGCAGAAT |
| | AAGTACGAGAATTACTCTACCTCTTTTTTCATCCGAGACATCATCAAACCTGAC |
| | CCACCAAAGAATTTGCAAATGAAACCCTTAAAAAACTCACAGGTGGAGGTGTCC |
| | TGGGAATATCCTGACTCTTGGTCTACCCCCCATTCTTACTTTTCCCTTAAGTTC |
| | TTCGTTAGAATACAACGTAAAAAAGAGAAGATGAAAGAAACGGAAGAAGGTTGC |
| | AACCAGAAAGGAGCATTTCTAGTTGAAAAGACCTCTACGGAAGTCCAGTGTAAA |
| | GGTGGAAATGTGTGTGTGCAAGCCCAGGACCGATATTACAACAGTTCGTGTTCG |
| | AAGTGGGCTTGCGTGCCGTGTCGTGTCCGATCTGTACCAGGAGTCGGAGTTCCT |
| | GGAGTAGGTCGTGTAATACCGGTATCCGGACCAGCTCGTTGCTTATCTCAATCG |
| | CGAAACCTACTTAAAACAACCGATGACATGGTGAAGACAGCGAGAGAAAAGCTT |
| | AAACATTATTCCTGTACCGCCGAAGACATCGATCATGAGGATATCACGAGAGAC |
| | CAGACCTCGACACTTAAGACATGCTTGCCACTAGAACTTCATAAAAATGAGTCT |
| | TGCTTAGCAACGCGAGAAACGTCGTCTACGACGCGTGGTTCATGTTTGCCGCCC |
| | CAAAAGACATCCTTGATGATGACGTTGTGTCTTGGATCCATCTATGAGGATTTA |
| | AAAATGTACCAGACAGAATTTCAGGCTATCAATGCAGCTCTACAGAATCATAAT |
| | CACCAGCAGATTATCTTAGACAAGGGAATGTTAGTAGCAATCGATGAGCTTATG |
| | CAATCCTTGAATCATAACGGAGAAACATTACGACAAAAGCCTCCGGTCGGTGAA |
| | GCGGATCCATATCGTGTGAAGATGAAATTATGTATATTGTTGCACGCCTTTAGT |
| | ACGCGTGTGGTCACCATAAACCGAGTAATGGGATACTTGTCCTCGGCGGGAGGT |
| | GGTGGTTCTGGTGGAGGTGGATCAGGTGGTGGTGGTTCAACCTTGGTTCTTTTT |
| | GGTGCGGGTTTCGGTGCCGTGATTACTGTCGTCGTCATAGTCGTCATTATTAAA |
| | TGTTTTTGTAAGTAA |
| | (Underlined and bold: transmembrane and cytoplasmic |
| | domain.) |
| Amino | MCPQKLTISWFAIVLLVSPLMAMWELEKDVYVVEVDWTPDAPGETVNLTCDTPE |
| acid: SEQ | EDDITWTSDQRHGVIGSGKTLTITVKEFLDAGQYTCHKGGETLSHSHLLLHKKE |
| ID NO: | NGIWSTEILKNFKNKTFLKCEAPNYSGRFTCSWLVQRNMDLKFNIKSSSSSPDS |
| 588 | RAVTCGMASLSAEKVTLDQRDYEKYSVSCQEDVTCPTAEETLPIELALEARQQN |
| | KYENYSTSFFIRDIIKPDPPKNLQMKPLKNSQVEVSWEYPDSWSTPHSYFSLKF |
| | FVRIQRKKEKMKETEEGCNQKGAFLVEKTSTEVQCKGGNVCVQAQDRYYNSSCS |
| | KWACVPCRVRSVPGVGVPGVGRVIPVSGPARCLSQSRNLLKTTDDMVKTAREKL |
| | KHYSCTAEDIDHEDITRDQTSTLKTCLPLELHKNESCLATRETSSTTRGSCLPP |
| | QKTSLMMTLCLGSIYEDLKMYQTEFQAINAALQNHNHQQIILDKGMLVAIDELM |
| | QSLNHNGETLRQKPPVGEADPYRVKMKLCILLHAFSTRVVTINRVMGYLSSAGG |
| | GGSGGGGSGGGGSTLVLFGAGFGAVITVVVIVVIIKCFCK |
| | (Underlined and bold: transmembrane and cytoplasmic |
| | domain.) |

Human FLT3-L

| | |
|---|---|
| Nucleotide | ATGACAGTCTTAGCGCCAGCTTGGAGTCCTACCACATATTTACTACTATTATTG |
| SEQ ID | CTTTTATCTAGTGGTTTATCAGGAACGCAAGACTGCTCATTCCAACATTCACCG |
| NO: 216 | ATCAGTTCCGACTTTGCAGTTAAGATTCGAGAACTATCAGACTACCTATTGCAA |
| | GACTATCCGGTGACGGTAGCATCGAATCTTCAAGACGAAGAGCTTTGTGGTGGA |
| | CTATGGCGTCTTGTACTTGCCCAAAGATGGATGGAGCGACTAAAAACCGTTGCC |
| | GGTTCAAAGATGCAGGGTTTACTAGAGCGTGTGAATACGGAAATTCATTTTGTT |
| | ACGAAATGTGCGTTCCAACCCCCACCCAGTTGCTTGCGTTTCGTGCAGACTAAT |
| | ATCTCTCGTTTACTACAAGAAACATCCGAGCAACTAGTGGCGCTAAAGCCCTGG |
| | ATAACACGTCAAAACTTTAGTCGTTGCTTGGAGTTACAGTGCCAACCCGGTGCC |
| | CCACGACCTCAAAGTCCTGGTCCAGCGGCTTGCGGAGCCCTTACCTGGCCTCGA |
| | CCGCATCCGGCCGAACCATGA |
| Amino | MTVLAPAWSPTTYLLLLLLLSSGLSGTQDCSFQHSPISSDFAVKIRELSDYLLQ |
| acid | DYPVTVASNLQDEELCGGLWRLVLAQRWMERLKTVAGSKMQGLLERVNTEIHFV |
| SEQ ID | TKCAFQPPPSCLRFVQTNISRLLQETSEQLVALKPWITRQNFSRCLELQCQPGA |
| NO: 213 | PRPQSPGPAACGALTWPRPHPAEP |

[0635] See Example 32 in Section 6.32 for exemplary methods of generating a recombinant vaccinia virus described herein.

### 5.4. Virus Propagation

[0636] The present invention features recombinant orthopoxviruses, including those constructed with one or more gene deletions compared to wild-type, such that the virus exhibits desirable properties for use against cancer cells, while being less toxic or non-toxic to non-cancer cells. This section summarizes various protocols, by way of example, for producing recombinant orthopoxviruses described herein, such as methods for generating mutated viruses through the use of recombinant DNA technology.

[0637] For example, to generate mutations in the orthopoxvirus genome, native and modified polypeptides may be encoded by a nucleic acid molecule comprised in a vector. Vectors may include, for example, plasmids, cosmids, viruses (bacteriophage, animal viruses, and plant viruses), and artificial chromosomes (e.g., YACs). One of skill in the art would be well equipped to construct a vector through standard recombinant techniques, which are described in Sambrook et al., (1989) and Ausubel et al., 1994, both incorporated herein by reference in their entirety. In addition to encoding a modified polypeptide, a vector may encode non-modified polypeptide sequences such as a tag or targeting molecule.

[0638] In order to propagate a vector in a host cell, it may contain one or more origins of replication sites (often termed “ori”), which is a specific nucleic acid sequence at which replication is initiated. Alternatively, an autonomously replicating sequence (ARS) can be employed if the host cell is yeast.

[0639] In the context of expressing a heterologous nucleic acid sequence, “host cell” refers to a prokaryotic or eukaryotic cell, and it includes any transformable organism that is capable of replicating a vector and/or expressing a heterologous gene encoded by a vector. A host cell can, and has been, used as a recipient for vectors or viruses (which qualify as a vector if they express an exogenous polypeptide). A host cell may be “transfected” or “transformed,” which refers to a process by which exogenous nucleic acid, such as a modified protein-encoding sequence, is transferred or introduced into the host cell. A transformed cell includes the primary subject cell and its progeny. Host cells may be derived from prokaryotes or eukaryotes, including yeast cells, insect cells, and mammalian cells, depending upon whether the desired result is replication of the vector or expression of part or all of the vector-encoded nucleic acid sequences. Numerous cell lines and cultures are available for use as a host cell, and they can be obtained through the American Type Culture Collection (ATCC), which is an organization that serves as an archive for living cultures and genetic materials (www.atcc.org). An appropriate host can be determined by one of skill in the art based on the vector backbone and the desired result. A plasmid or cosmid, for example, can be introduced into a prokaryote host cell for replication of many vectors. Bacterial cells used as host cells for vector replication and/or expression include DH5α, JM109, and KCB, as well as a number of commercially available bacterial hosts such as SURE® Competent Cells and SOLOPACK™ Gold Cells (STRATAGENE®, La Jolla, Calif.). Alternatively, bacterial cells such as E. coli LE392 could be used as host cells for phage viruses. Appropriate yeast cells include Saccharomyces cerevisiae, Saccharomyces pombe, and Pichia pastoris. Examples of eukaryotic host cells for replication and/or expression of a vector include HeLa, NIH3T3, Jurkat, 293, COS, CHO, Saos, and PC12. Many host cells from various cell types and organisms are available and would be known to one of skill in the art. Similarly, a viral vector may be used in conjunction with either a eukaryotic or prokaryotic host cell, particularly one that is permissive for replication or expression of the vector. Some vectors may employ control sequences that allow it to be replicated and/or expressed in both prokaryotic and eukaryotic cells. One of skill in the art would further understand the conditions under which to incubate all of the above described host cells to maintain them and to permit replication of a vector. Also understood and known are techniques and conditions that would allow large-scale production of vectors, as well as production of the nucleic acids encoded by vectors and their cognate polypeptides, proteins, or peptides.

[0640] Also provided herein are methods of propagating a virus described in Section 5.2.4 using a cell, a cell line, or a packaging cell line described in Sections 5.2.6 and 5.4. In one aspect, provided herein is a method of propagating a virus, comprising culturing a cell, a cell line, or a packaging cell line infected with a virus described herein. In some embodiments, the virus is isolated or purified after propagation. See examples in Section 6 for exemplary methods and techniques for propagating viruses.

### 5.5. Methods of Treatment

### 5.5.1. Pharmaceutical Composition, Administration, and Doses

[0641] Also provided herein are pharmaceutical composition comprising a virus described in Section 5.2.4 and a physiologically acceptable carrier. In certain embodiments, the pharmaceutical composition provided herein comprises a therapeutically effective amount of the virus. In certain embodiments, the pharmaceutical composition provided herein is to be used in a method of treatment described herein.

[0642] Therapeutic compositions containing recombinant orthopoxvirus vectors of the invention can be prepared using methods known in the art. For example, such compositions can be prepared using, e.g., physiologically acceptable carriers, excipients or stabilizers (Remington's Pharmaceutical Sciences 16th edition, Osol, A. Ed. (1980); incorporated herein by reference), and in a desired form, e.g., in the form of lyophilized formulations or aqueous solutions.

[0643] To induce oncolysis, kill cells, inhibit growth, inhibit metastases, decrease tumor size and otherwise reverse or reduce the malignant phenotype of tumor cells, using the methods and compositions of the present invention, one may contact a tumor with the modified orthopoxvirus, e.g., by administration of the orthopoxvirus to a patient having cancer by way of, for instance, one or more of the routes of administration described herein. The route of administration may vary with the location and nature of the cancer, and may include, e.g., intradermal, transdermal, parenteral, intravenous, intramuscular, intranasal, subcutaneous, regional (e.g., in the proximity of a tumor, particularly with the vasculature or adjacent vasculature of a tumor), percutaneous, intratracheal, intraperitoneal, intraarterial, intravesical, intratumoral, inhalation, perfusion, lavage, and oral administration and formulation. In specific embodiments, the pharmaceutical composition provided herein is formulated so that it is suitable for the route of administration to be employed.

[0644] The term “intravascular” is understood to refer to delivery into the vasculature of a patient, meaning into, within, or in a vessel or vessels of the patient. In certain embodiments, the administration is into a vessel considered to be a vein (intravenous), while in others administration is into a vessel considered to be an artery. Veins include, but are not limited to, the internal jugular vein, a peripheral vein, a coronary vein, a hepatic vein, the portal vein, great saphenous vein, the pulmonary vein, superior vena cava, inferior vena cava, a gastric vein, a splenic vein, inferior mesenteric vein, superior mesenteric vein, cephalic vein, and/or femoral vein. Arteries include, but are not limited to, coronary artery, pulmonary artery, brachial artery, internal carotid artery, aortic arch, femoral artery, peripheral artery, and/or ciliary artery. It is contemplated that delivery may be through or to an arteriole or capillary.

[0645] Intratumoral injection, or injection directly into the tumor vasculature is specifically contemplated for discrete, solid, accessible tumors. Local, regional or systemic administration also may be appropriate. The viral particles may advantageously be contacted by administering multiple injections to the tumor, spaced, for example, at approximately 1 cm intervals. In the case of surgical intervention, the present invention may be used preoperatively, such as to render an inoperable tumor subject to resection. Continuous administration also may be applied where appropriate, for example, by implanting a catheter into a tumor or into tumor vasculature. Such continuous perfusion may take place, for example, for a period of from about 1-2 hours, to about 2-6 hours, to about 6-12 hours, or about 12-24 hours following the initiation of treatment. Generally, the dose of the therapeutic composition via continuous perfusion may be equivalent to that given by a single or multiple injections, adjusted over a period of time during which the perfusion occurs. It is further contemplated that limb perfusion may be used to administer therapeutic compositions of the present invention, particularly in the treatment of melanomas and sarcomas.

[0646] Treatment regimens may vary, and often depend on tumor type, tumor location, disease progression, and health and age of the patient. Certain types of tumor will require more aggressive treatment, while at the same time, certain patients cannot tolerate more taxing protocols. The clinician will be best suited to make such decisions based on the known efficacy and toxicity (if any) of the therapeutic formulations. In certain embodiments, the tumor being treated may not, at least initially, be resectable. Treatments with the therapeutic agent of the disclosure may increase the resectability of the tumor due to shrinkage at the margins or by elimination of certain particularly invasive portions. Following treatments, resection may be possible. Additional treatments subsequent to resection will serve to eliminate microscopic residual disease at the tumor site.

[0647] The treatments may include various “unit doses.” Unit dose is defined as containing a predetermined-quantity of the therapeutic composition. The quantity to be administered, and the particular route and formulation, are within the skill of those in the clinical arts. A unit dose need not be administered as a single injection but may comprise continuous infusion over a set period of time. Unit dose of the present invention may conveniently be described in terms of plaque forming units (pfu) for a viral construct. Unit doses may range from 10³, 10⁴, 10⁵, 10⁶, 10⁷, 10⁸, 10⁹, 10¹⁰, 10¹¹, 10¹², to 10¹³ pfu and higher. Additionally or alternatively, depending on the kind of virus and the titer attainable, one may deliver 1 to 100, 10 to 50, 100-1000, or up to about or at least about 1×10⁴, 1×10⁵, 1×10⁶, 1×10⁷, 1×10⁸, 1×10⁹, 1×10¹¹, 1×10¹², 1×10¹³, 1×10¹⁴, or 1×10¹⁵ or higher infectious viral particles (vp), including all values and ranges there between, to the tumor or tumor site.

[0648] Another method of delivery of the recombinant orthopoxvirus genome disclosed herein to cancer or tumor cells may be via intratumoral injection. However, the pharmaceutical compositions disclosed herein may alternatively be administered parenterally, intravenously, intradermally, intramuscularly, transdermally or even intraperitoneally as described in U.S. Pat. Nos. 5,543,158; 5,641,515 and 5,399,363 (each specifically incorporated herein by reference in its entirety). Injection of nucleic acid constructs may be delivered by syringe or any other method used for injection of a solution, as long as the expression construct can pass through the particular gauge of needle required for injection. An exemplary needleless injection system that may be used for the administration of recombinant orthopoxviruses described herein is exemplified in U.S. Pat. No. 5,846,233. This system features a nozzle defining an ampule chamber for holding the solution and an energy device for pushing the solution out of the nozzle to the site of delivery. Another exemplary syringe system is one that permits multiple injections of predetermined quantities of a solution precisely at any depth (U.S. Pat. No. 5,846,225).

[0649] Mixtures of the viral particles or nucleic acids described herein may be prepared in water suitably mixed with one or more excipients, carriers, or diluents. Dispersions may also be prepared in glycerol, liquid polyethylene glycols, and mixtures thereof and in oils. Under ordinary conditions of storage and use, these preparations may contain a preservative to prevent the growth of microorganisms. The pharmaceutical forms suitable for injectable use include sterile aqueous solutions or dispersions and sterile powders for the extemporaneous preparation of sterile injectable solutions or dispersions (U.S. Pat. No. 5,466,468, specifically incorporated herein by reference in its entirety). In all cases the form may be sterile and may be fluid to the extent that easy syringability exists. It may be stable under the conditions of manufacture and storage and must be preserved against the contaminating action of microorganisms, such as bacteria and fungi. The carrier can be a solvent or dispersion medium containing, for example, water, ethanol, polyol (e.g., glycerol, propylene glycol, and liquid polyethylene glycol, and the like), suitable mixtures thereof, and/or vegetable oils. Proper fluidity may be maintained, for example, by the use of a coating, such as lecithin, by the maintenance of the required particle size in the case of dispersion and by the use of surfactants. The prevention of the action of microorganisms can be brought about by various antibacterial and antifungal agents, for example, parabens, chlorobutanol, phenol, sorbic acid, thimerosal, and the like. In many cases, it will be preferable to include isotonic agents, for example, sugars or sodium chloride. Prolonged absorption of the injectable compositions can be brought about by the use in the compositions of agents delaying absorption, for example, aluminum monostearate and gelatin.

[0650] For parenteral administration in an aqueous solution, for example, the solution may be suitably buffered if necessary and the liquid diluent first rendered isotonic with sufficient saline or glucose. These particular aqueous solutions are especially suitable for intravenous, intramuscular, subcutaneous, intratumoral and intraperitoneal administration. In this connection, sterile aqueous media that can be employed will be known to those of skill in the art in light of the present disclosure. For example, one dosage may be dissolved in 1 ml of isotonic NaCl solution and either added to 1000 ml of hypodermoclysis fluid or injected at the proposed site of infusion. Some variation in dosage will necessarily occur depending on the condition of the subject being treated. The person responsible for administration will, in any event, determine the appropriate dose for the individual subject. Moreover, for human administration, preparations should meet sterility, pyrogenicity, general safety, and purity standards as required by FDA Office of Biologics standards.

[0651] As used herein, “carrier” includes any and all solvents, dispersion media, vehicles, coatings, diluents, antibacterial and antifungal agents, isotonic and absorption delaying agents, buffers, carrier solutions, suspensions, colloids, and the like. The use of such media and agents for pharmaceutical active substances is well known in the art. Except insofar as any conventional media or agent is incompatible with the active ingredient, its use in the therapeutic compositions is contemplated. Supplementary active ingredients can also be incorporated into the compositions. The phrase “pharmaceutically acceptable” or “pharmacologically-acceptable” refers to molecular entities and compositions that do not produce an allergic or similar untoward reaction when administered to a human. The preparation of an aqueous composition that contains a protein as an active ingredient is well understood in the art. Typically, such compositions are prepared as injectables, either as liquid solutions or suspensions; solid forms suitable for solution in, or suspension in, liquid prior to injection can also be prepared.

### 5.5.2. Methods of Treatment

[0652] Also provided herein are methods of treating a cell proliferation disorder, such as cancer in a patient (e.g., a mammalian patient, such as a human patient).

[0653] In one aspect, provided herein is a method of treating a cell proliferation disorder, such as cancer in a patient (e.g., a mammalian patient, such as a human patient), the method comprising administering to the patient (e.g., a mammalian patient, such as a human patient) a therapeutically effective amount of a virus described in Section 5.2.4.

[0654] In another aspect, provided herein is a method of treating a cell proliferation disorder, such as cancer in a patient (e.g., a mammalian patient, such as a human patient), the method comprising administering to the patient (e.g., a mammalian patient, such as a human patient) a therapeutically effective amount of a pharmaceutical composition described in Section 5.5.1.

[0655] In a specific embodiment of the method of treating described herein, the mammalian patient is a human patient.

[0656] In certain embodiments of the method of treating described herein, the cancer is selected from the group consisting of leukemia, lymphoma, liver cancer, bone cancer, lung cancer, brain cancer, bladder cancer, gastrointestinal cancer, breast cancer, cardiac cancer, cervical cancer, uterine cancer, head and neck cancer, gallbladder cancer, laryngeal cancer, lip and oral cavity cancer, ocular cancer, melanoma, pancreatic cancer, prostate cancer, colorectal cancer, testicular cancer, and throat cancer.

[0657] In certain embodiments of the method of treating described herein, the cancer is selected from the group consisting of acute lymphoblastic leukemia (ALL), acute myeloid leukemia (AML), chronic lymphocytic leukemia (CLL), chronic myelogenous leukemia (CML), adrenocortical carcinoma, AIDS-related lymphoma, primary CNS lymphoma, anal cancer, appendix cancer, astrocytoma, atypical teratoid/rhabdoid tumor, basal cell carcinoma, bile duct cancer, extrahepatic cancer, Ewing sarcoma family, osteosarcoma and malignant fibrous histiocytoma, central nervous system embryonal tumors, central nervous system germ cell tumors, craniopharyngioma, ependymoma, bronchial tumors, Burkitt lymphoma, carcinoid tumor, primary lymphoma, chordoma, chronic myeloproliferative neoplasms, colon cancer, extrahepatic bile duct cancer, ductal carcinoma in situ (DCIS), endometrial cancer, ependymoma, esophageal cancer, esthesioneuroblastoma, extracranial germ cell tumor, extragonadal germ cell tumor, fallopian tube cancer, fibrous histiocytoma of bone, gastrointestinal carcinoid tumor, gastrointestinal stromal tumors (GIST), testicular germ cell tumor, gestational trophoblastic disease, glioma, childhood brain stem glioma, hairy cell leukemia, hepatocellular cancer, Langerhans cell histiocytosis, Hodgkin lymphoma, hypopharyngeal cancer, islet cell tumors, pancreatic neuroendocrine tumors, Wilms tumor and other childhood kidney tumors, Langerhans cell histiocytosis, small cell lung cancer, cutaneous T cell lymphoma, intraocular melanoma, Merkel cell carcinoma, mesothelioma, metastatic squamous neck cancer, midline tract carcinoma, multiple endocrine neoplasia syndromes, multiple myeloma/plasma cell neoplasm, myelodysplastic syndromes, nasal cavity and paranasal sinus cancer, nasopharyngeal cancer, neuroblastoma, non-Hodgkin's lymphoma (NHL), non-small cell lung cancer (NSCLC), epithelial ovarian cancer, germ cell ovarian cancer, low malignant potential ovarian cancer, pancreatic neuroendocrine tumors, papillomatosis, paraganglioma, paranasal sinus and nasal cavity cancer, parathyroid cancer, penile cancer, pharyngeal cancer, pheochromocytoma, pituitary tumor, pleuropulmonary blastoma, primary peritoneal cancer, rectal cancer, retinoblastoma, rhabdomyosarcoma, salivary gland cancer, Kaposi's sarcoma, rhabdomyosarcoma, Sézary syndrome, small intestine cancer, soft tissue sarcoma, throat cancer, thymoma and thymic carcinoma, thyroid cancer, transitional cell cancer of the renal pelvis and ureter, urethral cancer, endometrial uterine cancer, uterine sarcoma, vaginal cancer, vulvar cancer, and Waldenstrom macroglobulinemia.

[0658] In some embodiments of the method of treating described herein, the virus and the pharmaceutical composition are not administered in combination with another agent for treating the cell proliferation disorder (such as cancer).

[0659] In other embodiments of the method of treating described herein, the virus or the pharmaceutical composition is administered in combination with one or more additional agents for treating the cell proliferation disorder (such as cancer), for example, the one or more additional agents described in Section 5.5.3.

[0660] The recombinant orthopoxvirus and the pharmaceutical composition disclosed herein can be administered to a subject, e.g., a mammalian subject, such as a human, suffering from a cell proliferation disorder, such as cancer, e.g., to kill cancer cells directly by oncolysis and/or to enhance the effectiveness of the adaptive immune response against the target cancer cells. In some embodiments, the cell proliferation disorder is a cancer, such as leukemia, lymphoma, liver cancer, bone cancer, lung cancer, brain cancer, bladder cancer, gastrointestinal cancer, breast cancer, cardiac cancer, cervical cancer, uterine cancer, head and neck cancer, gallbladder cancer, laryngeal cancer, lip and oral cavity cancer, ocular cancer, melanoma, pancreatic cancer, prostate cancer, colorectal cancer, testicular cancer, or throat cancer. In particular cases, the cell proliferation disorder may be a cancer selected from the group consisting of acute lymphoblastic leukemia (ALL), acute myeloid leukemia (AML), chronic lymphocytic leukemia (CLL), chronic myelogenous leukemia (CML), adrenocortical carcinoma, AIDS-related lymphoma, primary CNS lymphoma, anal cancer, appendix cancer, astrocytoma, atypical teratoid/rhabdoid tumor, basal cell carcinoma, bile duct cancer, extrahepatic cancer, ewing sarcoma family, osteosarcoma and malignant fibrous histiocytoma, central nervous system embryonal tumors, central nervous system germ cell tumors, craniopharyngioma, ependymoma, bronchial tumors, burkitt lymphoma, carcinoid tumor, primary lymphoma, chordoma, chronic myeloproliferative neoplasms, colon cancer, extrahepatic bile duct cancer, ductal carcinoma in situ (DCIS), endometrial cancer, ependymoma, esophageal cancer, esthesioneuroblastoma, extracranial germ cell tumor, extragonadal germ cell tumor, fallopian tube cancer, fibrous histiocytoma of bone, gastrointestinal carcinoid tumor, gastrointestinal stromal tumors (GIST), testicular germ cell tumor, gestational trophoblastic disease, glioma, childhood brain stem glioma, hairy cell leukemia, hepatocellular cancer, langerhans cell histiocytosis, hodgkin lymphoma, hypopharyngeal cancer, islet cell tumors, pancreatic neuroendocrine tumors, wilms tumor and other childhood kidney tumors, langerhans cell histiocytosis, small cell lung cancer, cutaneous T-cell lymphoma, intraocular melanoma, merkel cell carcinoma, mesothelioma, metastatic squamous neck cancer, midline tract carcinoma, multiple endocrine neoplasia syndromes, multiple myeloma/plasma cell neoplasm, myelodysplastic syndromes, nasal cavity and paranasal sinus cancer, nasopharyngeal cancer, neuroblastoma, non-hodgkin lymphoma (NHL), non-small cell lung cancer (NSCLC), epithelial ovarian cancer, germ cell ovarian cancer, low malignant potential ovarian cancer, pancreatic neuroendocrine tumors, papillomatosis, paraganglioma, paranasal sinus and nasal cavity cancer, parathyroid cancer, penile cancer, pharyngeal cancer, pheochromocytoma, pituitary tumor, pleuropulmonary blastoma, primary peritoneal cancer, rectal cancer, retinoblastoma, rhabdomyosarcoma, salivary gland cancer, kaposi sarcoma, rhabdomyosarcoma, sézary syndrome, small intestine cancer, soft tissue sarcoma, throat cancer, thymoma and thymic carcinoma, thyroid cancer, transitional cell cancer of the renal pelvis and ureter, urethral cancer, endometrial uterine cancer, uterine sarcoma, vaginal cancer, vulvar cancer, and Waldenstrom macroglobulinemia.

[0661] A physician having ordinary skill in the art can readily determine an effective amount of the recombinant orthopoxvirus vector for administration to a subject, e.g., a mammalian subject (e.g., a human) in need thereof. For example, a physician may start prescribing doses of recombinant orthopoxvirus vector at levels lower than that required in order to achieve the desired therapeutic effect and gradually increase the dosage until the desired effect is achieved. Alternatively, a physician may begin a treatment regimen by administering a dose of recombinant orthopoxvirus vector and subsequently administer progressively lower doses until a therapeutic effect is achieved (e.g., a reduction in the volume of one or more tumors). In general, a suitable daily dose of a recombinant orthopoxvirus vector of the invention will be an amount of the recombinant orthopoxvirus vector which is the lowest dose effective to produce a therapeutic effect. A daily dose of a therapeutic composition of the recombinant orthopoxvirus vector of the invention may be administered as a single dose or as two, three, four, five, six or more doses administered separately at appropriate intervals throughout the day, week, month, or year, optionally, in unit dosage forms. While it is possible for the recombinant orthopoxvirus vector of the invention to be administered alone, it may also be administered as a pharmaceutical formulation in combination with excipients, carriers, and optionally, additional therapeutic agents.

[0662] Recombinant orthopoxvirus vectors of the invention can be monitored for their ability to attenuate the progression of a cell proliferation disease, such as cancer, by any of a variety of methods known in the art. For instance, a physician may monitor the response of a subject, e.g., a mammalian subject (e.g., a human) to treatment with recombinant orthopoxvirus vector of the invention by analyzing the volume of one or more tumors in the patient. Alternatively, a physician may monitor the responsiveness of a subject (e.g., a human) t to treatment with recombinant orthopoxvirus vector of the invention by analyzing the T-reg cell population in the lymph of a particular subject. For instance, a physician may withdraw a sample from a subject, e.g., a mammalian subject (e.g., a human) and determine the quantity or density of cancer cells using established procedures, such as fluorescence activated cell sorting. A finding that the quantity of cancer cells in the sample has decreased (e.g., by 1%, 2%, 3%, 4%, 5%, 6%, 7%, 8%, 9%, 10%, 20%, 30%, 40%, 50%, 60%, 70%, 80%, 90%, 95%, 96%, 97%, 98%, 99%, or more) relative to the quantity of cancer cells in a sample obtained from the subject prior to administration of the recombinant orthopoxvirus may be an indication that the orthopoxvirus administration is effectively treating the cancer.

### 5.5.3. Combination Therapy

[0663] The recombinant orthopoxvirus vectors described herein may be administered with one or more additional agents, such as an immune checkpoint inhibitor. For instance, the recombinant orthopoxvirus vector can be administered simultaneously with, admixed with, or administered separately from an immune checkpoint inhibitor. Exemplary immune checkpoint inhibitors for use in conjunction with the compositions and methods of the invention include but are not limited to OX40 ligand, ICOS ligand, anti-CD47 antibody or antigen-binding fragment thereof, anti-CD40/CD40L antibody or antigen-binding fragment thereof, anti-Lag3 antibody or antigen-binding fragment thereof, anti-CTLA-4 antibody or antigen-binding fragment thereof, anti-PD-L1 antibody or antigen-binding fragment thereof, anti-PD1 antibody or antigen-binding fragment thereof, and anti-Tim-3 antibody or antigen-binding fragment thereof. Additionally or alternatively, a vector of the invention can be administered simultaneously with, admixed with, or administered separately from an interleukin (IL). For instance, the recombinant orthopoxvirus vector can be administered simultaneously with, admixed with, or administered separately from an interleukin. Exemplary interleukins for use in conjunction with the compositions and methods of the invention include but are not limited to IL-1 alpha, IL-1 beta, IL-2, IL-4, IL-7, IL-10, IL-12 p35, IL-12 p40, IL-12 p70, IL-15, IL-18, IL-21, and IL-23. Additionally or alternatively, a vector of the invention can be administered simultaneously with, admixed with, or administered separately from an interferon. For instance, the recombinant orthopoxvirus vector can be administered simultaneously with, admixed with, or administered separately from an interferon. Exemplary interferons for use in conjunction with the compositions and methods of the invention include but are not limited to IFN-alpha, IFN-beta, IFN-delta, IFN-epsilon, IFN-tau, IFN-omega, IFN-zeta, and IFN-gamma. Additionally or alternatively, a vector of the invention can be administered simultaneously with, admixed with, or administered separately from a TNF superfamily member protein. For instance, the recombinant orthopoxvirus vector can be administered simultaneously with, admixed with, or administered separately from a TNF superfamily member protein. Exemplary TNF superfamily member proteins for use in conjunction with the compositions and methods of the invention include but are not limited to TRAIL, Fas ligand, LIGHT (TNFSF-14), TNF-alpha, and 4-1BB ligand. Additionally or alternatively, a vector of the invention can be administered simultaneously with, admixed with, or administered separately from a cytokine. For instance, the recombinant orthopoxvirus vector can be administered simultaneously with, admixed with, or administered separately from a cytokine. Exemplary cytokines for use in conjunction with the compositions and methods of the invention includes but are not limited to GM-CSF, Flt3 ligand, CD40 ligand, anti-TGF-beta, anti-VEGF-R2, and cGAS (guanyl adenylate cyclase).

[0664] Additionally or alternatively, immune checkpoint inhibitors may be expressed in the orthopoxvirus itself. For instance, the recombinant orthopoxvirus vector can include a transgene encoding an immune checkpoint inhibitor. Exemplary immune checkpoint inhibitors for expression by the orthopoxvirus of the compositions and methods of the invention include but are not limited to OX40 ligand, ICOS ligand, anti-CD47 antibody or antigen-binding fragment thereof, anti-CD40/CD40L antibody or antigen-binding fragment thereof, anti-Lag3 antibody or antigen-binding fragment thereof, anti-CTLA-4 antibody or antigen-binding fragment thereof, anti-PD-L1 antibody or antigen-binding fragment thereof, anti-PD1 antibody or antigen-binding fragment thereof, and anti-Tim-3 antibody or antigen-binding fragment thereof. Additionally or alternatively, interleukins may be expressed in the orthopoxvirus itself. For instance, the recombinant orthopoxvirus vector can include a transgene encoding an interleukin. Exemplary immune checkpoint inhibitors for expression by the orthopoxvirus of the compositions and methods of the invention include but are not limited to IL-1 alpha, IL-1 beta, IL-2, IL-4, IL-7, IL-10, IL-12 p35, IL-12 p40, IL-12 p70, IL-15, IL-18, IL-21, and IL-23. Additionally or alternatively, interferons may be expressed in the orthopoxvirus itself. For instance, the recombinant orthopoxvirus vector can include a transgene encoding an interferon. Exemplary interferons for expression by the orthopoxvirus of the compositions and methods of the invention include but are not limited to IFN-alpha, IFN-beta, IFN-delta, IFN-epsilon, IFN-tau, IFN-omega, IFN-zeta, and IFN-gamma. Additionally or alternatively, TNF superfamily member proteins may be expressed in the orthopoxvirus itself. For instance, the recombinant orthopoxvirus vector can include a transgene encoding a TNF superfamily member protein. Exemplary TNF superfamily member proteins for expression by the orthopoxvirus of the compositions and methods of the invention include but are not limited to TRAIL, Fas ligand, LIGHT (TNFSF-14), TNF-alpha, and 4-1BB ligand. Additionally or alternatively, cytokines may be expressed in the orthopoxvirus itself. For instance, the recombinant orthopoxvirus vector can include a transgene encoding a cytokine. Exemplary cytokines for expression by the orthopoxvirus of the compositions and methods of the invention include but are not limited to GM-CSF, fms-related tyrosine kinase 3 (Flt3) ligand, CD40 ligand, TGF-beta, VEGF-R2, and c-KIT.

[0665] Additionally or alternatively, tumor-associated antigens may be expressed in the orthopoxvirus itself. For instance, the recombinant orthopoxvirus vector can include a transgene encoding a tumor-associated antigen. Exemplary tumor-associated antigens for expression by the orthopoxvirus of the compositions and methods of the invention include but are not limited to CD19, CD33, EpCAM, CEA, PSMA, EGFRvIII, CD133, EGFR, CDH19, ENPP3, DLL3, MSLN, ROR1, HER2, HLAA2, EpHA2, EpHA3, MCSP, CSPG4, NG2, RON, FLT3, BCMA, CD20, FAPα, FRα, CA-9, PDGFRα, PDGFRβ, FSP1, S100A4, ADAM12m, RET, MET, FGFR, INSR, NTRK, MAGE-A3, NY-ESO-1, one or more human papillomavirus (HPV) proteins, E6 and E7 proteins of HPV16, E6 and E7 proteins of HPV18, brachyury, or prostatic acid phosphatase, or one or more fragments thereof. Additional examples of tumor-associated antigens for use in conjunction with the compositions and methods described herein include, but are not limited to, those listed in Tables 3-30

[0666] In certain embodiments of the method of treating described herein, the method further comprises administering to the patient (e.g., a mammalian patient, such as a human patient) an immune checkpoint inhibitor. In specific embodiments, the immune checkpoint inhibitor is selected from the group consisting of OX40 ligand, ICOS ligand, anti-CD47 antibody or antigen-binding fragment thereof, anti-CD40/CD40L antibody or antigen-binding fragment thereof, anti-Lag3 antibody or antigen-binding fragment thereof, anti-CTLA-4 antibody or antigen-binding fragment thereof, anti-PD-L1 antibody or antigen-binding fragment thereof, anti-PD1 antibody or antigen-binding fragment thereof, and anti-Tim-3 antibody or antigen-binding fragment thereof. In a specific embodiment, the immune checkpoint inhibitor is an anti-PD1 antibody or antigen-binding fragment thereof or an anti-CTLA-4 antibody or antigen-binding fragment thereof. In another specific embodiment, the immune checkpoint inhibitor is an anti-PD1 antibody or antigen-binding fragment thereof. In another specific embodiment, the immune checkpoint inhibitor is an anti-CTLA-4 antibody or antigen-binding fragment thereof. In another specific embodiment, the immune checkpoint inhibitor is an anti-PD-L1 antibody or antigen-binding fragment thereof. In a specific embodiment, the immune checkpoint inhibitor is ipilimumab. In another specific embodiment, the immune checkpoint inhibitor is tremelimumab. In another specific embodiment, the immune checkpoint inhibitor is nivolumab. In another specific embodiment, the immune checkpoint inhibitor is pembrolizumab. In another specific embodiment, the immune checkpoint inhibitor is cemiplimab. In another specific embodiment, the immune checkpoint inhibitor is atezolizumab. In another specific embodiment, the immune checkpoint inhibitor is avelumab. In another specific embodiment, the immune checkpoint inhibitor is durvalumab.

[0667] In certain embodiments of the method of treating described herein, the method further comprises administering to the patient (e.g., a mammalian patient, such as a human patient) an interleukin. In specific embodiments, the interleukin is selected from the group consisting of IL-1 alpha, IL-1 beta, IL-2, IL-4, IL-7, IL-10, IL-12 p35, IL-12 p40, IL-12 p70, IL-15, IL-18, IL-21, and IL-23. In specific embodiments, the interleukin is selected from the group consisting of IL-12 p35, IL-12 p40, and IL-12 p70. In specific embodiments, the interleukin is membrane-bound.

[0668] In certain embodiments of the method of treating described herein, the method further comprises administering to the patient (e.g., a mammalian patient, such as a human patient) an interferon. In specific embodiments, the interferon is selected from the group consisting of IFN-alpha, IFN-beta, IFN-delta, IFN-epsilon, IFN-tau, IFN-omega, IFN-zeta, and IFN-gamma.

[0669] In certain embodiments of the method of treating described herein, the method further comprises administering to the patient (e.g., a mammalian patient, such as a human patient) a cytokine. In specific embodiments, the cytokine is a TNF superfamily member protein. In a specific embodiment, the TNF superfamily member protein is selected from the group consisting of TRAIL, Fas ligand, LIGHT (TNFSF-14), TNF-alpha, and 4-1BB ligand. In specific embodiments, the cytokine is selected from the group consisting of GM-CSF, Flt3 ligand, CD40 ligand, TGF-beta, VEGF-R2, and cKit. In a specific embodiment, the cytokine is Flt3 ligand.

### 5.6. Kits

[0670] Also provided herein are kits that can be used in accordance with the invention.

[0671] In one aspect, provided herein is a kit comprising a nucleic acid described in Section 5.2.3 and a package insert instructing a user of the kit to express the nucleic acid in a host cell.

[0672] In another aspect, provided herein is a kit comprising a virus described in Section 5.2.4 and a package insert instructing a user of the kit to express the virus in a host cell.

[0673] In another aspect, provided herein is a kit comprising a virus described in Section 5.2.4 and a package insert instructing a user to administer a therapeutically effective amount of the virus to a patient (e.g., a mammalian patient, such as a human patient) having cancer, thereby treating the cancer. In certain embodiments, the mammalian patient is a human patient. The cancer to be treated can be a cancer described in Section 5.5.

[0674] In preferred embodiments, the nucleic acid or the virus is stored in one or more containers suitable for storing the nucleic acid or the virus. In certain embodiments, the kits provided herein further comprise controls suitable for their intended use.

### 5.7. Illustrative Embodiments

### 5.7.1. Set 1

[0675] 1. A nucleic acid comprising a recombinant orthopoxvirus genome, wherein said recombinant orthopoxvirus genome comprises a deletion of at least 2 genes, each independently selected from the group consisting of F1L, N1L, B14R, M2L, K1L, K7R, C2L, N2L, M1L, K2L, K3L, F3L, B16R, B19R, K4L, K5L, K6L, F2L, B15R, B17L, B18R, and B20R.
[0676] 2. The nucleic acid of embodiment 1, wherein said deletion comprises at least 3 genes, each independently selected from the group consisting of F1L, N1L, B14R, M2L, K1L, K7R, C2L, N2L, M1L, K2L, K3L, F3L, B16R, B19R, K4L, K5L, K6L, F2L, B15R, B17L, B18R, and B20R.
[0677] 3. The nucleic acid of embodiment 2, wherein said deletion comprises at least 4 genes, each independently selected from the group consisting of F1L, N1L, B14R, M2L, K1L, K7R, C2L, N2L, M1L, K2L, K3L, F3L, B16R, B19R, K4L, K5L, K6L, F2L, B15R, B17L, B18R, and B20R.
[0678] 4. The nucleic acid of embodiment 3, wherein said deletion comprises at least 5 genes, each independently selected from the group consisting of F1L, N1L, B14R, M2L, K1L, K7R, C2L, N2L, M1L, K2L, K3L, F3L, B16R, B19R, K4L, K5L, K6L, F2L, B15R, B17L, B18R, and B20R.
[0679] 5. The nucleic acid of embodiment 4, wherein said deletion comprises at least 6 genes, each independently selected from the group consisting of F1L, N1L, B14R, M2L, K1L, K7R, C2L, N2L, M1L, K2L, K3L, F3L, B16R, B19R, K4L, K5L, K6L, F2L, B15R, B17L, B18R, and B20R.
[0680] 6. The nucleic acid of embodiment 5, wherein said deletion comprises at least 7 genes, each independently selected from the group consisting of F1L, N1L, B14R, M2L, K1L, K7R, C2L, N2L, M1L, K2L, K3L, F3L, B16R, B19R, K4L, K5L, K6L, F2L, B15R, B17L, B18R, and B20R.
[0681] 7. The nucleic acid of embodiment 6, wherein said deletion comprises at least 8 genes, each independently selected from the group consisting of F1L, N1L, B14R, M2L, K1L, K7R, C2L, N2L, M1L, K2L, K3L, F3L, B16R, B19R, K4L, K5L, K6L, F2L, B15R, B17L, B18R, and B20R.
[0682] 8. The nucleic acid of embodiment 7, wherein said deletion comprises at least 9 genes, each independently selected from the group consisting of F1L, N1L, B14R, M2L, K1L, K7R, C2L, N2L, M1L, K2L, K3L, F3L, B16R, B19R, K4L, K5L, K6L, F2L, B15R, B17L, B18R, and B20R.
[0683] 9. The nucleic acid of embodiment 8, wherein said deletion comprises at least 10 genes, each independently selected from the group consisting of F1L, N1L, B14R, M2L, K1L, K7R, C2L, N2L, M1L, K2L, K3L, F3L, B16R, B19R, K4L, K5L, K6L, F2L, B15R, B17L, B18R, and B20R.
[0684] 10. The nucleic acid of embodiment 9, wherein said deletion comprises at least 11 genes, each independently selected from the group consisting of F1L, N1L, B14R, M2L, K1L, K7R, C2L, N2L, M1L, K2L, K3L, F3L, B16R, B19R, K4L, K5L, K6L, F2L, B15R, B17L, B18R, and B20R.
[0685] 11. The nucleic acid of embodiment 10, wherein said deletion comprises at least 12 genes, each independently selected from the group consisting of F1L, N1L, B14R, M2L, K1L, K7R, C2L, N2L, M1L, K2L, K3L, F3L, B16R, B19R, K4L, K5L, K6L, F2L, B15R, B17L, B18R, and B20R.
[0686] 12. The nucleic acid of embodiment 11, wherein said deletion comprises at least 13 genes, each independently selected from the group consisting of F1L, N1L, B14R, M2L, K1L, K7R, C2L, N2L, M1L, K2L, K3L, F3L, B16R, B19R, K4L, K5L, K6L, F2L, B15R, B17L, B18R, and B20R.
[0687] 13. The nucleic acid of embodiment 12, wherein said deletion comprises at least 14 genes, each independently selected from the group consisting of F1L, N1L, B14R, M2L, K1L, K7R, C2L, N2L, M1L, K2L, K3L, F3L, B16R, B19R, K4L, K5L, K6L, F2L, B15R, B17L, B18R, and B20R.
[0688] 14. The nucleic acid of embodiment 13, wherein said deletion comprises at least 15 genes, each independently selected from the group consisting of F1L, N1L, B14R, M2L, K1L, K7R, C2L, N2L, M1L, K2L, K3L, F3L, B16R, B19R, K4L, K5L, K6L, F2L, B15R, B17L, B18R, and B20R.
[0689] 15. The nucleic acid of embodiment 14, wherein said deletion comprises at least 16 genes, each independently selected from the group consisting of F1L, N1L, B14R, M2L, K1L, K7R, C2L, N2L, M1L, K2L, K3L, F3L, B16R, B19R, K4L, K5L, K6L, F2L, B15R, B17L, B18R, and B20R.
[0690] 16. The nucleic acid of embodiment 15, wherein said deletion comprises at least 17 genes, each independently selected from the group consisting of F1L, N1L, B14R, M2L, K1L, K7R, C2L, N2L, M1L, K2L, K3L, F3L, B16R, B19R, K4L, K5L, K6L, F2L, B15R, B17L, B18R, and B20R.
[0691] 17. The nucleic acid of embodiment 16, wherein said deletion comprises at least 18 genes, each independently selected from the group consisting of F1L, N1L, B14R, M2L, K1L, K7R, C2L, N2L, M1L, K2L, K3L, F3L, B16R, B19R, K4L, K5L, K6L, F2L, B15R, B17L, B18R, and B20R.
[0692] 18. The nucleic acid of embodiment 17, wherein said deletion comprises at least 19 genes, each independently selected from the group consisting of F1L, N1L, B14R, M2L, K1L, K7R, C2L, N2L, M1L, K2L, K3L, F3L, B16R, B19R, K4L, K5L, K6L, F2L, B15R, B17L, B18R, and B20R.
[0693] 19. The nucleic acid of embodiment 18, wherein said deletion comprises at least 20 genes, each independently selected from the group consisting of F1L, N1L, B14R, M2L, K1L, K7R, C2L, N2L, M1L, K2L, K3L, F3L, B16R, B19R, K4L, K5L, K6L, F2L, B15R, B17L, B18R, and B20R.
[0694] 20. The nucleic acid of embodiment 19, wherein said deletion comprises at least 21 genes, each independently selected from the group consisting of F1L, N1L, B14R, M2L, K1L, K7R, C2L, N2L, M1L, K2L, K3L, F3L, B16R, B19R, K4L, K5L, K6L, F2L, B15R, B17L, B18R, and B20R.
[0695] 21. The nucleic acid of embodiment 20, wherein said deletion comprises each of said F1L, N1L, B14R, M2L, K1L, K7R, C2L, N2L, M1L, K2L, K3L, F3L, B16R, B19R, K4L, K5L, K6L, F2L, B15R, B17L, B18R, and B20R genes.
[0696] 22. A nucleic acid comprising a recombinant orthopoxvirus genome, wherein said recombinant orthopoxvirus genome comprises a deletion of at least 1 gene selected from the group consisting of B14R, B16R, B17L, B18R, B19R, and B20R.
[0697] 23. The nucleic acid of any one of embodiments 1-22, wherein said recombinant orthopoxvirus genome comprises a deletion of at least 1 gene selected from the group consisting of B14R, B16R, B17L, B18R, B19R, and B20R.
[0698] 24. The nucleic acid of embodiment 23, wherein said deletion comprises at least 2 genes, each independently selected from the group consisting of B14R, B16R, B17L, B18R, B19R, and B20R.
[0699] 25. The nucleic acid of embodiment 24, wherein said deletion comprises at least 3 genes, each independently selected from the group consisting of B14R, B16R, B17L, B18R, B19R, and B20R.
[0700] 26. The nucleic acid of embodiment 25, wherein said deletion comprises at least 4 genes, each independently selected from the group consisting of B14R, B16R, B17L, B18R, B19R, and B20R.
[0701] 27. The nucleic acid of embodiment 26, wherein said deletion comprises at least 5 genes, each independently selected from the group consisting of B14R, B16R, B17L, B18R, B19R, and B20R.
[0702] 28. The nucleic acid of embodiment 27, wherein said deletion comprises each of said B14R, B16R, B17L, B18R, B19R, and B20R genes.
[0703] 29. A nucleic acid comprising a recombinant orthopoxvirus genome, wherein said recombinant orthopoxvirus genome comprises a deletion of at least 1 gene selected from the group consisting of C2L, C1L, N1L, N2L, M1L, K1L, K2L, K3L, K4L, K7R, and F2L.
[0704] 30. The nucleic acid of any one of embodiments 1-29, wherein said recombinant orthopoxvirus genome comprises a deletion of at least 1 gene selected from the group consisting of C2L, C1L, N1L, N2L, M1L, K1L, K2L, K3L, K4L, K7R, and F2L.
[0705] 31. The nucleic acid of embodiment 30, wherein said deletion comprises at least 2 genes, each independently selected from the group consisting of C2L, C1L, N1L, N2L, M1L, K1L, K2L, K3L, K4L, K7R, and F2L.
[0706] 32. The nucleic acid of embodiment 31, wherein said deletion comprises at least 3 genes, each independently selected from the group consisting of C2L, C1L, N1L, N2L, M1L, K1L, K2L, K3L, K4L, K7R, and F2L.
[0707] 33. The nucleic acid of embodiment 32, wherein said deletion comprises at least 4 genes, each independently selected from the group consisting of C2L, C1L, N1L, N2L, M1L, K1L, K2L, K3L, K4L, K7R, and F2L.
[0708] 34. The nucleic acid of embodiment 33, wherein said deletion comprises at least 5 genes, each independently selected from the group consisting of C2L, C1L, N1L, N2L, M1L, K1L, K2L, K3L, K4L, K7R, and F2L.
[0709] 35. The nucleic acid of embodiment 34, wherein said deletion comprises at least 6 genes, each independently selected from the group consisting of C2L, C1L, N1L, N2L, M1L, K1L, K2L, K3L, K4L, K7R, and F2L.
[0710] 36. The nucleic acid of embodiment 35, wherein said deletion comprises at least 7 genes, each independently selected from the group consisting of C2L, C1L, N1L, N2L, M1L, K1L, K2L, K3L, K4L, K7R, and F2L.
[0711] 37. The nucleic acid of embodiment 36, wherein said deletion comprises at least 8 genes, each independently selected from the group consisting of C2L, C1L, N1L, N2L, M1L, K1L, K2L, K3L, K4L, K7R, and F2L.
[0712] 38. The nucleic acid of embodiment 37, wherein said deletion comprises at least 9 genes, each independently selected from the group consisting of C2L, C1L, N1L, N2L, M1L, K1L, K2L, K3L, K4L, K7R, and F2L.
[0713] 39. The nucleic acid of embodiment 38, wherein said deletion comprises at least 10 genes, each independently selected from the group consisting of C2L, C1L, N1L, N2L, M1L, K1L, K2L, K3L, K4L, K7R, and F2L.
[0714] 40. The nucleic acid of embodiment 39, wherein said deletion comprises each of said C2L, C1L, N1L, N2L, M1L, K1L, K2L, K3L, K4L, K7R, and F2L genes.
[0715] 41. A nucleic acid comprising a recombinant orthopoxvirus genome, wherein said recombinant orthopoxvirus genome comprises a deletion of at least 1 gene that encodes a caspase-9 inhibitor.
[0716] 42. The nucleic acid of any one of embodiments 1-41, wherein said recombinant orthopoxvirus genome comprises a deletion of at least 1 gene that encodes a caspase-9 inhibitor.
[0717] 43. The nucleic acid of embodiment 41 or 42, wherein said gene that encodes a caspase-9 inhibitor is F1L.
[0718] 44. A nucleic acid comprising a recombinant orthopoxvirus genome, wherein said recombinant orthopoxvirus genome comprises a deletion of at least 1 gene that encodes a BCL-2 inhibitor.
[0719] 45. The nucleic acid of any one of embodiments 1-44, wherein said recombinant orthopoxvirus genome comprises a deletion of at least 1 gene that encodes a BCL-2 inhibitor.
[0720] 46. The nucleic acid of embodiment 44 or 45, wherein said gene that encodes a BCL-2 inhibitor is N1L.
[0721] 47. A nucleic acid comprising a recombinant orthopoxvirus genome, wherein said recombinant orthopoxvirus genome comprises a deletion of at least 1 gene that encodes a dUTPase.
[0722] 48. The nucleic acid of any one of embodiments 1-47, wherein said recombinant orthopoxvirus genome comprises a deletion of at least 1 gene that encodes a dUTPase.
[0723] 49. The nucleic acid of embodiment 46 or 47, wherein said gene that encodes a dUTPase is F2L.
[0724] 50. A nucleic acid comprising a recombinant orthopoxvirus genome, wherein said recombinant orthopoxvirus genome comprises a deletion of at least 1 gene that encodes a IFN-alpha/beta-receptor-like secreted glycoprotein.
[0725] 51. The nucleic acid of any one of embodiments 1-50, wherein said recombinant orthopoxvirus genome comprises a deletion of at least 1 gene that encodes a IFN-alpha/beta-receptor-like secreted glycoprotein.
[0726] 52. The nucleic acid of embodiment 50 or 51, wherein said gene that encodes a IFN-alpha/beta-receptor-like secreted glycoprotein is B19R.
[0727] 53. A nucleic acid comprising a recombinant orthopoxvirus genome, wherein said recombinant orthopoxvirus genome comprises a deletion of at least 1 gene that encodes an IL-1-beta-inhibitor.
[0728] 54. The nucleic acid of any one of embodiments 1-53, wherein said recombinant orthopoxvirus genome comprises a deletion of at least 1 gene that encodes an IL-1-beta-inhibitor.
[0729] 55. The nucleic acid of embodiment 53 or 54, wherein said gene that encodes an IL-1-beta-inhibitor is B16R.
[0730] 56. A nucleic acid comprising a recombinant orthopoxvirus genome, wherein said recombinant orthopoxvirus genome comprises a deletion of at least 1 gene that encodes a phospholipase-D.
[0731] 57. The nucleic acid of any one of embodiments 1-56, wherein said recombinant orthopoxvirus genome comprises a deletion of at least 1 gene that encodes a phospholipase-D.
[0732] 58. The nucleic acid of embodiment 56 or 57, wherein said gene that encodes a phospholipase-D is K4L.
[0733] 59. A nucleic acid comprising a recombinant orthopoxvirus genome, wherein said recombinant orthopoxvirus genome comprises a deletion of at least 1 gene that encodes a PKR inhibitor.
[0734] 60. The nucleic acid of any one of embodiments 1-59, wherein said recombinant orthopoxvirus genome comprises a deletion of at least 1 gene that encodes a PKR inhibitor.
[0735] 61. The nucleic acid of embodiment 59 or 60, wherein said gene that encodes a PKR inhibitor is K3L.
[0736] 62. A nucleic acid comprising a recombinant orthopoxvirus genome, wherein said recombinant orthopoxvirus genome comprises a deletion of at least 1 gene that encodes a serine protease inhibitor.
[0737] 63. The nucleic acid of any one of embodiments 1-62, wherein said recombinant orthopoxvirus genome comprises a deletion of at least 1 gene that encodes a serine protease inhibitor.
[0738] 64. The nucleic acid of embodiment 62 or 63, wherein said gene that encodes a serine protease inhibitor is K2L.
[0739] 65. A nucleic acid comprising a recombinant orthopoxvirus genome, wherein said recombinant orthopoxvirus genome comprises a deletion of at least 1 gene that encodes a TLR signaling inhibitor.
[0740] 66. The nucleic acid of any one of embodiments 1-65, wherein said recombinant orthopoxvirus genome comprises a deletion of at least 1 gene that encodes a TLR signaling inhibitor.
[0741] 67. The nucleic acid of embodiment 65 or 66, wherein said gene that encodes a TLR signaling inhibitor is N2L.
[0742] 68. A nucleic acid comprising a recombinant orthopoxvirus genome, wherein said recombinant orthopoxvirus genome comprises a deletion of at least 1 gene that encodes a kelch-like protein.
[0743] 69. The nucleic acid of any one of embodiments 1-68, wherein said recombinant orthopoxvirus genome comprises a deletion of at least 1 gene that encodes a kelch-like protein.
[0744] 70. The nucleic acid of embodiment 69, wherein said recombinant orthopoxvirus genome comprises a deletion of at least 2 genes that each encodes a kelch-like protein.
[0745] 71. The nucleic acid of any one of embodiments 68-70, wherein said genes that encode a kelch-like protein are, independently, selected from the group consisting of F3L and C2L.
[0746] 72. A nucleic acid comprising a recombinant orthopoxvirus genome, wherein said recombinant orthopoxvirus genome comprises a deletion of at least 1 gene that encodes a monoglyceride lipase.
[0747] 73. The nucleic acid of any one of embodiments 1-72, wherein said recombinant orthopoxvirus genome comprises a deletion of at least 1 gene that encodes a monoglyceride lipase.
[0748] 74. The nucleic acid of embodiment 73, wherein said recombinant orthopoxvirus genome comprises a deletion of at least 2 genes that each encodes a monoglyceride lipase.
[0749] 75. The nucleic acid of any one of embodiments 72-74, wherein said genes that encode a monoglyceride lipase are, independently, selected from the group consisting of K5L and K6L.
[0750] 76. A nucleic acid comprising a recombinant orthopoxvirus genome, wherein said recombinant orthopoxvirus genome comprises a deletion of at least 1 gene that encodes an NF-κB inhibitor.
[0751] 77. The nucleic acid of any one of embodiments 1-76, wherein said recombinant orthopoxvirus genome comprises a deletion of at least 1 gene that encodes an NF-κB inhibitor.
[0752] 78. The nucleic acid of embodiment 77, wherein said recombinant orthopoxvirus genome comprises a deletion of at least 2 genes that each encodes an NF-κB inhibitor.
[0753] 79. The nuclei acid of embodiment 78, wherein said recombinant orthopoxvirus genome comprises a deletion of at least 3 genes that each encodes an NF-κB inhibitor.
[0754] 80. The nucleic acid of any one of embodiments 76-79, wherein said genes that encode an NF-κB inhibitor are, independently, selected from the group consisting of K7R, K1L, and M2L.
[0755] 81. A nucleic acid comprising a recombinant orthopoxvirus genome, wherein said recombinant orthopoxvirus genome comprises a deletion of at least 1 gene that encodes an Ankyrin repeat protein.
[0756] 82. The nucleic acid of any one of embodiments 1-81, wherein said recombinant orthopoxvirus genome comprises a deletion of at least 1 gene that encodes an Ankyrin repeat protein.
[0757] 83. The nucleic acid of embodiment 82, wherein said recombinant orthopoxvirus genome comprises a deletion of at least 2 genes that each encodes an Ankyrin repeat protein.
[0758] 84. The nuclei acid of embodiment 83, wherein said recombinant orthopoxvirus genome comprises a deletion of at least 3 genes that each encodes an Ankyrin repeat protein.
[0759] 85. The nucleic acid of any one of embodiments 81-84, wherein said genes that encode an Ankyrin repeat protein are, independently, selected from the group consisting of B 18R, B20R, and M1L.
[0760] 86. A nucleic acid comprising a recombinant orthopoxvirus genome, wherein said recombinant orthopoxvirus genome comprises a deletion of at least 1 gene selected from the group consisting of B15R, B17R, and B14R.
[0761] 87. The nucleic acid of any one of embodiments 1-86, wherein said recombinant orthopoxvirus genome comprises a deletion of at least 1 gene selected from the group consisting of B15R, B17R, and B14R.
[0762] 88. The nucleic acid of embodiment 87, wherein said deletion comprises at least 2 genes, each independently selected from the group consisting of B15R, B17R, and B14R.
[0763] 89. The nucleic acid of embodiment 88, wherein said deletion comprises each of said B15R, B17R, and B14R genes.
[0764] 90. The nucleic acid of any one of embodiments 1-89, wherein said recombinant orthopoxvirus genome comprises a deletion of at least 1 gene selected from the group of ITR genes consisting of B21R, B22R, B23R, B24R, B25R, B26R, B27R, B28R, and B29R.
[0765] 91. The nucleic acid of embodiment 90, wherein said deletion comprises at least 2 genes, each independently selected from said group of ITR genes consisting of B21R, B22R, B23R, B24R, B25R, B26R, B27R, B28R, and B29R.
[0766] 92. The nucleic acid of embodiment 91, wherein said deletion comprises at least 3 genes, each independently selected from said group of ITR genes consisting of B21R, B22R, B23R, B24R, B25R, B26R, B27R, B28R, and B29R.
[0767] 93. The nucleic acid of embodiment 92, wherein said deletion comprises at least 4 genes, each independently selected from said group of ITR genes consisting of B21R, B22R, B23R, B24R, B25R, B26R, B27R, B28R, and B29R.
[0768] 94. The nucleic acid of embodiment 93, wherein said deletion comprises at least 5 genes, each independently selected from said group of ITR genes consisting of B21R, B22R, B23R, B24R, B25R, B26R, B27R, B28R, and B29R.
[0769] 95. The nucleic acid of embodiment 94, wherein said deletion comprises at least 6 genes, each independently selected from said group of ITR genes consisting of B21R, B22R, B23R, B24R, B25R, B26R, B27R, B28R, and B29R.
[0770] 96. The nucleic acid of embodiment 95, wherein said deletion comprises at least 7 genes, each independently selected from said group of ITR genes consisting of B21R, B22R, B23R, B24R, B25R, B26R, B27R, B28R, and B29R.
[0771] 97. The nucleic acid of embodiment 96, wherein said deletion comprises at least 8 genes, each independently selected from said group of ITR genes consisting of B21R, B22R, B23R, B24R, B25R, B26R, B27R, B28R, and B29R.
[0772] 98. The nucleic acid of embodiment 97, wherein said deletion comprises each of said B21R, B22R, B23R, B24R, B25R, B26R, B27R, B28R, and B29R genes.
[0773] 99.
[0774] 100.
[0775] 102. The nucleic acid of embodiment 101, wherein said vaccinia virus is a strain selected from the group consisting of Copenhagen, Western Reserve, Wyeth, Lister, EM63, ACAM2000, LC16m8, CV-1, modified vaccinia Ankara (MVA), Dairen I, GLV-1h68, IHD-J, L-IVP, LC16m8, LC16mO, Tashkent, Tian Tan, and WAU86/88-1.
[0776] 103. The nucleic acid of embodiment 101, wherein said vaccinia virus is a strain selected from the group consisting of Copenhagen, Western Reserve, Tian Tan, Wyeth, and Lister.
[0777] 104. The nucleic acid of embodiment 101, wherein said vaccinia virus is a Copenhagen strain vaccinia virus.
[0778] 105. The nucleic acid of any one of embodiments 1-104, wherein each of said deletions is a deletion of the entire polynucleotide encoding the corresponding gene.
[0779] 106. The nucleic acid of any one of embodiments 1-104, wherein each of said deletions is a deletion of a portion of the polynucleotide encoding the corresponding gene, and wherein said deletion is sufficient to render said gene nonfunctional upon introduction into a host cell.
[0780] 107. The nucleic acid of any one of embodiments 1-106, wherein said nucleic acid further comprises a transgene encoding a tumor-associated antigen.
[0781] 108. The nucleic acid of embodiment 107, wherein said tumor-associated antigen is a tumor-associated antigen listed in any one of Tables 3-30.
[0782] 109. The nucleic acid of embodiment 107, wherein said tumor-associated antigen is a tumor-associated antigen selected from the group consisting of CD19, CD33, EpCAM, CEA, PSMA, EGFRvIII, CD133, EGFR, CDH19, ENPP3, DLL3, MSLN, ROR1, HER2, HLAA2, EpHA2, EpHA3, MCSP, CSPG4, NG2, RON, FLT3, BCMA, CD20, FAPα, FRα, CA-9, PDGFRα, PDGFRβ, FSP1, S100A4, ADAM12m, RET, MET, FGFR, INSR, and NTRK.
[0783] 110. The nucleic acid of embodiment 107, wherein said tumor-associated antigen comprises MAGE-A3, or one or more fragments thereof.
[0784] 111. The nucleic acid of embodiment 107, wherein said tumor-associated antigen comprises NY-ESO-1, or one or more fragments thereof.
[0785] 112. The nucleic acid of embodiment 107, wherein said tumor-associated antigen comprises one or more human papillomavirus (HPV) proteins, or fragments thereof.
[0786] 113. The nucleic acid of embodiment 107, wherein said tumor-associated antigen comprises (i) E6 and E7 proteins, or fragments thereof, of HPV16 and (ii) E6 and E7 proteins, or fragments thereof, of HPV18.
[0787] 114. The nucleic acid of embodiment 107, wherein said tumor-associated antigen comprises brachyury or one or more fragments thereof.
[0788] 115. The nucleic acid of embodiment 107, wherein said tumor-associated antigen comprises prostatic acid phosphatase, or one or more fragments thereof.
[0789] 116. A method of producing the nucleic acid of any one of embodiments 107-115, said method comprising:
   [0790] a. introducing a transposon insertion site into the nucleic acid of any one of embodiments 1-106;
   [0791] b. contacting the nucleic acid formed in (a) with a transposable element comprising a gene encoding said tumor-associated antigen, thereby introducing said gene into said nucleic acid; and
   [0792] c. recovering the nucleic acid formed in (b).
[0793] 117. The nucleic acid of any one of embodiments 1-115, wherein said nucleic acid further comprises a transgene encoding an immune checkpoint inhibitor.
[0794] 118. The nucleic acid of embodiment 117, wherein said immune checkpoint inhibitor is selected from the group consisting of OX40 ligand, ICOS ligand, anti-CD47 antibody or antigen-binding fragment thereof, anti-CD40/CD40L antibody or antigen-binding fragment thereof, anti-Lag3 antibody or antigen-binding fragment thereof, anti-CTLA-4 antibody or antigen-binding fragment thereof, anti-PD-L1 antibody or antigen-binding fragment thereof, anti-PD1 antibody or antigen-binding fragment thereof, and anti-Tim-3 antibody or antigen-binding fragment thereof.
[0795] 119. The nucleic acid of embodiment 117, wherein said immune checkpoint inhibitor is an anti-PD-L1 antibody or antigen-binding fragment thereof or an anti-CTLA-4 antibody or antigen-binding fragment thereof.
[0796] 120. The nucleic acid of embodiment 117, wherein said immune checkpoint inhibitor is an anti-PD1 antibody or antigen-binding fragment thereof.
[0797] 121. The nucleic acid of embodiment 117, wherein said immune checkpoint inhibitor is an anti-CTLA-4 antibody or antigen-binding fragment thereof.
[0798] 122. A method of producing the nucleic acid of any one of embodiments 117-121, said method comprising:
   [0799] a. introducing a transposon insertion site into the nucleic acid of any one of embodiments 1-116;
   [0800] b. contacting the nucleic acid formed in (a) with a transposable element comprising a gene encoding said immune checkpoint inhibitor, thereby introducing said gene into said nucleic acid; and
   [0801] c. recovering the nucleic acid formed in (b).
[0802] 123. The nucleic acid of any one of embodiments 1-115 and 117-121, wherein said nucleic acid further comprises a transgene encoding an interleukin (IL).
[0803] 124. The nucleic acid of embodiment 123, wherein said interleukin is selected from the group consisting of
[0804] IL-1 alpha, IL-1 beta, IL-2, IL-4, IL-7, IL-10, IL-12 p35, IL-12 p40, IL-12 p70, IL-15, IL-18, IL-21, and IL-23.
[0805] 125. The nucleic acid of embodiment 123, wherein said interleukin is selected from the group consisting of IL-12 p35, IL-12 p70.
[0806] 126. The nucleic acid of embodiment 125, wherein said interleukin is membrane-bound.
[0807] 127. A method of producing the nucleic acid of one of embodiments 123-126, said method comprising:
   [0808] a. introducing a transposon insertion site into the nucleic acid of any one of embodiments 1-115 and 117-121;
   [0809] b. contacting the nucleic acid formed in (a) with a transposable element comprising a gene encoding said interleukin, thereby introducing said gene into said nucleic acid; and
   [0810] c. recovering the nucleic acid formed in (b).
[0811] 128. The nucleic acid of any one of embodiments 1-115, 117-121, and 123-126, wherein said nucleic acid further comprises a transgene encoding an interferon (IFN).
[0812] 129. The nucleic acid of embodiment 128, wherein said interferon is selected from the group consisting of IFN-alpha, IFN-beta, IFN-delta, IFN-epsilon, IFN-tau, IFN-omega, IFN-zeta, and IFN-gamma.
[0813] 130. A method of producing the nucleic acid of embodiment 128 or 129, said method comprising:
   [0814] a. introducing a transposon insertion site into the nucleic acid of any one of embodiments 1-115, 117-121, and 123-126;
   [0815] b. contacting the nucleic acid formed in (a) with a transposable element comprising a gene encoding said interferon, thereby introducing said gene into said nucleic acid; and
   [0816] c. recovering the nucleic acid formed in (b).
[0817] 131. The nucleic acid of any one of embodiments 1-115, 117-121, 123-126, 128, and 129, wherein said nucleic acid further comprises a transgene encoding a TNF superfamily member protein.
[0818] 132. The nucleic acid of embodiment 131, wherein said TNF superfamily member protein is selected from the group consisting of TRAIL, Fas ligand, LIGHT (TNFSF-14), TNF-alpha, and 4-1BB ligand.
[0819] 133. A method of producing the nucleic acid of embodiment 131 or 132, said method comprising:
   [0820] a. introducing a transposon insertion site into the nucleic acid of any one of embodiments 1-115, 117-121, 123-126, 128, and 129;
   [0821] b. contacting the nucleic acid formed in (a) with a transposable element comprising a gene encoding said TNF superfamily member protein, thereby introducing said gene into said nucleic acid; and
   [0822] c. recovering the nucleic acid formed in (b).
[0823] 134. The nucleic acid of any one of embodiments 1-115, 117-121, 123-126, 128, 129, 131, and 132 wherein said nucleic acid further comprises a transgene encoding a cytokine.
[0824] 135. The nucleic acid of embodiment 134, wherein said cytokine is selected from the group consisting of GM-CSF, Flt3 ligand, CD40 ligand, anti-TGF-beta, anti-VEGF-R2, and cGAS (guanyl adenylate cyclase).
[0825] 136. The nucleic acid of embodiment 134, wherein said cytokine is Flt3 ligand.
[0826] 137. A method of producing the nucleic acid of embodiment 135 or 136, said method comprising:
   [0827] a. introducing a transposon insertion site into the nucleic acid of any one of embodiments 1-115, 117-121, 123-126, 128, 129, 131, and 132;
   [0828] b. contacting the nucleic acid formed in (a) with a transposable element comprising a gene encoding said cytokine, thereby introducing said gene into said nucleic acid; and
   [0829] c. recovering the nucleic acid formed in (b).
[0830] 138. The nucleic acid of any one of embodiments 1-115, 117-121, 123-126, 128, 129, 131, 132, and 134-136, wherein said nucleic acid further comprises a transgene encoding microRNA (miRNA).
[0831] 139. The nucleic acid of embodiment 138, wherein said miRNA is mir-6.
[0832] 140. A method of producing the nucleic acid of embodiment 138 or 139, said method comprising:
   [0833] a. introducing a transposon insertion site into the nucleic acid of any one of embodiments 1-115, 117-121, 123-126, 128, 129, 131, 132, and 134-136;
   [0834] b. contacting the nucleic acid formed in (a) with a transposable element comprising a gene encoding said miRNA, thereby introducing said gene into said nucleic acid; and
   [0835] c. recovering the nucleic acid formed in (b).
[0836] 141. A recombinant orthopoxvirus vector comprising a deletion of at least 2 genes, each independently selected from the group consisting of F1L, N1L, B14R, M2L, K1L, K7R, C2L, N2L, M1L, K2L, K3L, F3L, B16R, B19R, K4L, K5L, K6L, F2L, B15R, B17L, B18R, and B20R.
[0837] 142. The recombinant orthopoxvirus vector of embodiment 141, wherein said deletion comprises at least 3 genes, each independently selected from the group consisting of F1L, N1L, B14R, M2L, K1L, K7R, C2L, N2L, M1L, K2L, K3L, F3L, B16R, B19R, K4L, K5L, K6L, F2L, B15R, B17L, B18R, and B20R.
[0838] 143. The recombinant orthopoxvirus vector of embodiment 142, wherein said deletion comprises at least 4 genes, each independently selected from the group consisting of F1L, N1L, B14R, M2L, K1L, K7R, C2L, N2L, M1L, K2L, K3L, F3L, B16R, B19R, K4L, K5L, K6L, F2L, B15R, B17L, B18R, and B20R.
[0839] 144. The recombinant orthopoxvirus vector of embodiment 143, wherein said deletion comprises at least 5 genes, each independently selected from the group consisting of F1L, N1L, B14R, M2L, K1L, K7R, C2L, N2L, M1L, K2L, K3L, F3L, B16R, B19R, K4L, K5L, K6L, F2L, B15R, B17L, B18R, and B20R.
[0840] 145. The recombinant orthopoxvirus vector of embodiment 144, wherein said deletion comprises at least 6 genes, each independently selected from the group consisting of F1L, N1L, B14R, M2L, K1L, K7R, C2L, N2L, M1L, K2L, K3L, F3L, B16R, B19R, K4L, K5L, K6L, F2L, B15R, B17L, B18R, and B20R.
[0841] 146. The recombinant orthopoxvirus vector of embodiment 145, wherein said deletion comprises at least 7 genes, each independently selected from the group consisting of F1L, N1L, B14R, M2L, K1L, K7R, C2L, N2L, M1L, K2L, K3L, F3L, B16R, B19R, K4L, K5L, K6L, F2L, B15R, B17L, B18R, and B20R.
[0842] 147. The recombinant orthopoxvirus vector of embodiment 146, wherein said deletion comprises at least 8 genes, each independently selected from the group consisting of F1L, N1L, B14R, M2L, K1L, K7R, C2L, N2L, M1L, K2L, K3L, F3L, B16R, B19R, K4L, K5L, K6L, F2L, B15R, B17L, B18R, and B20R.
[0843] 148. The recombinant orthopoxvirus vector of embodiment 147, wherein said deletion comprises at least 9 genes, each independently selected from the group consisting of F1L, N1L, B14R, M2L, K1L, K7R, C2L, N2L, M1L, K2L, K3L, F3L, B16R, B19R, K4L, K5L, K6L, F2L, B15R, B17L, B18R, and B20R.
[0844] 149. The recombinant orthopoxvirus vector of embodiment 148, wherein said deletion comprises at least 10 genes, each independently selected from the group consisting of F1L, N1L, B14R, M2L, K1L, K7R, C2L, N2L, M1L, K2L, K3L, F3L, B16R, B19R, K4L, K5L, K6L, F2L, B15R, B17L, B18R, and B20R.
[0845] 150. The recombinant orthopoxvirus vector of embodiment 149, wherein said deletion comprises at least 11 genes, each independently selected from the group consisting of F1L, N1L, B14R, M2L, K1L, K7R, C2L, N2L, M1L, K2L, K3L, F3L, B16R, B19R, K4L, K5L, K6L, F2L, B15R, B17L, B18R, and B20R.
[0846] 151. The recombinant orthopoxvirus vector of embodiment 150, wherein said deletion comprises at least 12 genes, each independently selected from the group consisting of F1L, N1L, B14R, M2L, K1L, K7R, C2L, N2L, M1L, K2L, K3L, F3L, B16R, B19R, K4L, K5L, K6L, F2L, B15R, B17L, B18R, and B20R.
[0847] 152. The recombinant orthopoxvirus vector of embodiment 151, wherein said deletion comprises at least 13 genes, each independently selected from the group consisting of F1L, N1L, B14R, M2L, K1L, K7R, C2L, N2L, M1L, K2L, K3L, F3L, B16R, B19R, K4L, K5L, K6L, F2L, B15R, B17L, B18R, and B20R.
[0848] 153. The recombinant orthopoxvirus vector of embodiment 152, wherein said deletion comprises at least 14 genes, each independently selected from the group consisting of F1L, N1L, B14R, M2L, K1L, K7R, C2L, N2L, M1L, K2L, K3L, F3L, B16R, B19R, K4L, K5L, K6L, F2L, B15R, B17L, B18R, and B20R.
[0849] 154. The recombinant orthopoxvirus vector of embodiment 153, wherein said deletion comprises at least 15 genes, each independently selected from the group consisting of F1L, N1L, B14R, M2L, K1L, K7R, C2L, N2L, M1L, K2L, K3L, F3L, B16R, B19R, K4L, K5L, K6L, F2L, B15R, B17L, B18R, and B20R.
[0850] 155. The recombinant orthopoxvirus vector of embodiment 154, wherein said deletion comprises at least 16 genes, each independently selected from the group consisting of F1L, N1L, B14R, M2L, K1L, K7R, C2L, N2L, M1L, K2L, K3L, F3L, B16R, B19R, K4L, K5L, K6L, F2L, B15R, B17L, B18R, and B20R.
[0851] 156. The recombinant orthopoxvirus vector of embodiment 155, wherein said deletion comprises at least 17 genes, each independently selected from the group consisting of F1L, N1L, B14R, M2L, K1L, K7R, C2L, N2L, M1L, K2L, K3L, F3L, B16R, B19R, K4L, K5L, K6L, F2L, B15R, B17L, B18R, and B20R.
[0852] 157. The recombinant orthopoxvirus vector of embodiment 156, wherein said deletion comprises at least 18 genes, each independently selected from the group consisting of F1L, N1L, B14R, M2L, K1L, K7R, C2L, N2L, M1L, K2L, K3L, F3L, B16R, B19R, K4L, K5L, K6L, F2L, B15R, B17L, B18R, and B20R.
[0853] 158. The recombinant orthopoxvirus vector of embodiment 157, wherein said deletion comprises at least 19 genes, each independently selected from the group consisting of F1L, N1L, B14R, M2L, K1L, K7R, C2L, N2L, M1L, K2L, K3L, F3L, B16R, B19R, K4L, K5L, K6L, F2L, B15R, B17L, B18R, and B20R.
[0854] 159. The recombinant orthopoxvirus vector of embodiment 158, wherein said deletion comprises at least 20 genes, each independently selected from the group consisting of F1L, N1L, B14R, M2L, K1L, K7R, C2L, N2L, M1L, K2L, K3L, F3L, B16R, B19R, K4L, K5L, K6L, F2L, B15R, B17L, B18R, and B20R.
[0855] 160. The recombinant orthopoxvirus vector of embodiment 159, wherein said deletion comprises at least 21 genes, each independently selected from the group consisting of F1L, N1L, B14R, M2L, K1L, K7R, C2L, N2L, M1L, K2L, K3L, F3L, B16R, B19R, K4L, K5L, K6L, F2L, B15R, B17L, B18R, and B20R.
[0856] 161. The recombinant orthopoxvirus vector of embodiment 160, wherein said deletion comprises each of said F1L, N1L, B14R, M2L, K1L, K7R, C2L, N2L, M1L, K2L, K3L, F3L, B16R, B19R, K4L, K5L, K6L, F2L, B15R, B17L, B18R, and B20R genes.
[0857] 162. A recombinant orthopoxvirus vector comprising a deletion of at least 1 gene selected from the group consisting of B14R, B16R, B17L, B18R, B19R, and B20R.
[0858] 163. The recombinant orthopoxvirus vector of any one of embodiments 141-162, wherein said vector comprises a deletion of at least 1 gene selected from the group consisting of B14R, B16R, B17L, B18R, B19R, and B20R.
[0859] 164. The vector of embodiment 163, wherein said deletion comprises at least 2 genes, each independently selected from the group consisting of B14R, B16R, B17L, B18R, B19R, and B20R.
[0860] 165. The vector of embodiment 164, wherein said deletion comprises at least 3 genes, each independently selected from the group consisting of B14R, B16R, B17L, B18R, B19R, and B20R.
[0861] 166. The vector of embodiment 165, wherein said deletion comprises at least 4 genes, each independently selected from the group consisting of B14R, B16R, B17L, B18R, B19R, and B20R.
[0862] 167. The vector of embodiment 166, wherein said deletion comprises at least 5 genes, each independently selected from the group consisting of B14R, B16R, B17L, B18R, B19R, and B20R.
[0863] 168. The vector of embodiment 167, wherein said deletion comprises each of B14R, B16R, B17L, B18R, B19R, and B20R.
[0864] 169. A recombinant orthopoxvirus vector comprising a deletion of at least 1 gene selected from the group consisting of C2L, C1L, N1L, N2L, M1L, K1L, K2L, K3L, K4L, K7R, and F2L.
[0865] 170. The recombinant orthopoxvirus vector of any one of embodiments 141-169, wherein said vector comprises a deletion of at least 1 gene selected from the group consisting of C2L, C1L, N1L, N2L, M1L, K1L, K2L, K3L, K4L, K7R, and F2L.
[0866] 171. The vector of embodiment 170, wherein said deletion comprises at least 2 genes, each independently selected from the group consisting of C2L, C1L, N1L, N2L, M1L, K1L, K2L, K3L, K4L, K7R, and F2L.
[0867] 172. The vector of embodiment 171, wherein said deletion comprises at least 3 genes, each independently selected from the group consisting of C2L, C1L, N1L, N2L, M1L, K1L, K2L, K3L, K4L, K7R, and F2L.
[0868] 173. The vector of embodiment 172, wherein said deletion comprises at least 4 genes, each independently selected from the group consisting of C2L, C1L, N1L, N2L, M1L, K1L, K2L, K3L, K4L, K7R, and F2L.
[0869] 174. The vector of embodiment 173, wherein said deletion comprises at least 5 genes, each independently selected from the group consisting of C2L, C1L, N1L, N2L, M1L, K1L, K2L, K3L, K4L, K7R, and F2L.
[0870] 175. The vector of embodiment 174, wherein said deletion comprises at least 6 genes, each independently selected from the group consisting of C2L, C1L, N1L, N2L, M1L, K1L, K2L, K3L, K4L, K7R, and F2L.
[0871] 176. The vector of embodiment 175, wherein said deletion comprises at least 7 genes, each independently selected from the group consisting of C2L, C1L, N1L, N2L, M1L, K1L, K2L, K3L, K4L, K7R, and F2L.
[0872] 177. The vector of embodiment 176, wherein said deletion comprises at least 8 genes, each independently selected from the group consisting of C2L, C1L, N1L, N2L, M1L, K1L, K2L, K3L, K4L, K7R, and F2L.
[0873] 178. The vector of embodiment 177, wherein said deletion comprises at least 9 genes, each independently selected from the group consisting of C2L, C1L, N1L, N2L, M1L, K1L, K2L, K3L, K4L, K7R, and F2L.
[0874] 179. The vector of embodiment 178, wherein said deletion comprises at least 10 genes, each independently selected from the group consisting of C2L, C1L, N1L, N2L, M1L, K1L, K2L, K3L, K4L, K7R, and F2L.
[0875] 180. The vector of embodiment 179, wherein said deletion comprises each of C2L, C1L, N1L, N2L, M1L, K1L, K2L, K3L, K4L, K7R, and F2L.
[0876] 181. A recombinant orthopoxvirus vector comprising a deletion of at least 1 gene that encodes a caspase-9 inhibitor.
[0877] 182. The recombinant orthopoxvirus vector of any one of embodiments 141-181, wherein said vector comprises a deletion of at least 1 gene that encodes a caspase-9 inhibitor.
[0878] 183. The vector of embodiment 181 or 182, wherein said gene that encodes a caspase-9 inhibitor is F1L.
[0879] 184. A recombinant orthopoxvirus vector, wherein said vector comprises a deletion of at least 1 gene that encodes a BCL-2 inhibitor.
[0880] 185. The recombinant orthopoxvirus vector of any one of embodiments 141-184, wherein said vector comprises a deletion of at least 1 gene that encodes a BCL-2 inhibitor.
[0881] 186. The vector of embodiment 184 or 185, wherein said gene that encodes a BCL-2 inhibitor is N1L.
[0882] 187. A recombinant orthopoxvirus vector, wherein said vector comprises a deletion of at least 1 gene that encodes a dUTPase.
[0883] 188. The recombinant orthopoxvirus vector of any one of embodiments 141-187, wherein said vector comprises a deletion of at least 1 gene that encodes a dUTPase.
[0884] 189. The vector of embodiment 187 or 188, wherein said gene that encodes a dUTPase is F2L.
[0885] 190. A recombinant orthopoxvirus vector, wherein said vector comprises a deletion of at least 1 gene that encodes a IFN-alpha/beta-receptor-like secreted glycoprotein.
[0886] 191. The recombinant orthopoxvirus vector of any one of embodiments 141-190, wherein said vector comprises a deletion of at least 1 gene that encodes a IFN-alpha/beta-receptor-like secreted glycoprotein.
[0887] 192. The vector of embodiment 190 or 191, wherein said gene that encodes a IFN-alpha/beta-receptor-like secreted glycoprotein is B19R.
[0888] 193. A recombinant orthopoxvirus vector, wherein said vector comprises a deletion of at least 1 gene that encodes an IL-1-beta-inhibitor.
[0889] 194. The recombinant orthopoxvirus vector of any one of embodiments 141-193, wherein said vector comprises a deletion of at least 1 gene that encodes an IL-1-beta-inhibitor.
[0890] 195. The vector of embodiment 193 or 194, wherein said gene that encodes an IL-1-beta-inhibitor is B16R.
[0891] 196. A recombinant orthopoxvirus vector, wherein said vector comprises a deletion of at least 1 gene that encodes a phospholipase-D.
[0892] 197. The recombinant orthopoxvirus vector of any one of embodiments 141-196, wherein said vector comprises a deletion of at least 1 gene that encodes a phospholipase-D.
[0893] 198. The vector of embodiment 196 or 197, wherein said gene that encodes a phospholipase-D is K4L.
[0894] 199. A recombinant orthopoxvirus vector, wherein said vector comprises a deletion of at least 1 gene that encodes a PKR inhibitor.
[0895] 200. The recombinant orthopoxvirus vector of any one of embodiments 141-199, wherein said vector comprises a deletion of at least 1 gene that encodes a PKR inhibitor.
[0896] 201. The vector of embodiment 199 or 200, wherein said gene that encodes a PKR inhibitor is K3L.
[0897] 202. A recombinant orthopoxvirus vector, wherein said vector comprises a deletion of at least 1 gene that encodes a serine protease inhibitor.
[0898] 203. The recombinant orthopoxvirus vector of any one of embodiments 141-202, wherein said vector comprises a deletion of at least 1 gene that encodes a serine protease inhibitor.
[0899] 204. The vector of embodiment 202 or 203, wherein said gene that encodes a serine protease inhibitor is K2L.
[0900] 205. A recombinant orthopoxvirus vector, wherein said vector comprises a deletion of at least 1 gene that encodes a TLR signaling inhibitor.
[0901] 206. The recombinant orthopoxvirus vector of any one of embodiments 141-205, wherein said vector comprises a deletion of at least 1 gene that encodes a TLR signaling inhibitor.
[0902] 207. The vector of embodiment 205 or 206, wherein said gene that encodes a TLR signaling inhibitor is N2L.
[0903] 208. A recombinant orthopoxvirus vector, wherein said vector comprises a deletion of at least 1 gene that encodes a kelch-like protein.
[0904] 209. The recombinant orthopoxvirus vector of any one of embodiments 141-208, wherein said vector comprises a deletion of at least 1 gene that encodes a kelch-like protein.
[0905] 210. The vector of embodiment 209, wherein said vector comprises a deletion of at least 2 genes that each encodes a kelch-like protein.
[0906] 211. The vector of any one of embodiments 208-210, wherein said genes that encode a kelch-like protein are, independently, selected from the group consisting of F3L and C2L.
[0907] 212. A recombinant orthopoxvirus vector, wherein said vector comprises a deletion of at least 1 gene that encodes a monoglyceride lipase.
[0908] 213. The recombinant orthopoxvirus vector of any one of embodiments 141-212, wherein said vector comprises a deletion of at least 1 gene that encodes a monoglyceride lipase.
[0909] 214. The vector of embodiment 213, wherein said vector comprises a deletion of at least 2 genes that each encodes a monoglyceride lipase.
[0910] 215. The vector of any one of embodiments 212-214, wherein said genes that encode a monoglyceride lipase are, independently, selected from the group consisting of K5L and K6L.
[0911] 216. A recombinant orthopoxvirus vector, wherein said vector comprises a deletion of at least 1 gene that encodes an NF-κB inhibitor.
[0912] 217. The recombinant orthopoxvirus vector of any one of embodiments 141-216, wherein said vector comprises a deletion of at least 1 gene that encodes an NF-κB inhibitor.
[0913] 218. The vector of embodiment 217, wherein said deletion comprises at least 2 genes that each encodes an NF-κB inhibitor.
[0914] 219. The vector of embodiment 218, wherein said deletion comprises at least 3 genes that each encodes an NF-κB inhibitor.
[0915] 220. The vector of any one of embodiments 216-219, wherein said genes that encode an NF-κB inhibitor are, independently, selected from the group consisting of K7R, K1L, and M2L.
[0916] 221. A recombinant orthopoxvirus vector, wherein said vector comprises a deletion of at least 1 gene that encodes an Ankyrin repeat protein.
[0917] 222. The recombinant orthopoxvirus vector of any one of embodiments 141-221, wherein said vector comprises a deletion of at least 1 gene that encodes an Ankyrin repeat protein.
[0918] 223. The vector of embodiment 222, wherein said deletion comprises at least 2 genes that each encodes an Ankyrin repeat protein.
[0919] 224. The vector of embodiment 223, wherein said deletion comprises at least 3 genes that each encodes an Ankyrin repeat protein.
[0920] 225. The recombinant orthopoxvirus vector of any one of embodiments 221-224, wherein said genes that encode an Ankyrin repeat protein are, independently, selected from the group consisting of B18R, B20R, and M1L.
[0921] 226. A recombinant orthopoxvirus vector, wherein said vector comprises a deletion of at least 1 gene selected from the group consisting of B15R, B17R, and B14R.
[0922] 227. The recombinant orthopoxvirus vector of any one of embodiments 1-226, wherein said vector comprises a deletion of at least 1 gene selected from the group consisting of B15R, B17R, and B14R.
[0923] 228. The vector of embodiment 227, wherein said deletion comprises at least 2 genes, each independently selected from the group consisting of B15R, B17R, and B14R.
[0924] 229. The vector of embodiment 228, wherein said deletion comprises each of said B15R, B17R, and B14R genes.
[0925] 230. The recombinant orthopoxvirus vector of any one of embodiments 141-229, wherein said vector comprises a deletion of at least 1 gene selected from the group of ITR genes consisting of B21R, B22R, B23R, B24R, B25R, B26R, B27R, B28R, and B29R.
[0926] 231. The vector of embodiment 230, wherein said deletion comprises at least 2 genes, each independently selected from said group of ITR genes consisting of B21R, B22R, B23R, B24R, B25R, B26R, B27R, B28R, and B29R.
[0927] 232. The vector of embodiment 231, wherein said deletion comprises at least 3 genes, each independently selected from said group of ITR genes consisting of B21R, B22R, B23R, B24R, B25R, B26R, B27R, B28R, and B29R.
[0928] 233. The vector of embodiment 232, wherein said deletion comprises at least 4 genes, each independently selected from said group of ITR genes consisting of B21R, B22R, B23R, B24R, B25R, B26R, B27R, B28R, and B29R.
[0929] 234. The vector of embodiment 233, wherein said deletion comprises at least 5 genes, each independently selected from said group of ITR genes consisting of B21R, B22R, B23R, B24R, B25R, B26R, B27R, B28R, and B29R.
[0930] 235. The vector of embodiment 234, wherein said deletion comprises at least 6 genes, each independently selected from said group of ITR genes consisting of B21R, B22R, B23R, B24R, B25R, B26R, B27R, B28R, and B29R.
[0931] 236. The vector of embodiment 235, wherein said deletion comprises at least 7 genes, each independently selected from said group of ITR genes consisting of B21R, B22R, B23R, B24R, B25R, B26R, B27R, B28R, and B29R.
[0932] 237. The vector of embodiment 236, wherein said deletion comprises at least 8 genes, each independently selected from said group of ITR genes consisting of B21R, B22R, B23R, B24R, B25R, B26R, B27R, B28R, and B29R.
[0933] 238. The vector of embodiment 237, wherein said deletion comprises each of B21R, B22R, B23R, B24R, B25R, B26R, B27R, B28R, and B29R.
[0934] 239.
[0935] 242. The recombinant orthopoxvirus vector of embodiment 241, wherein said vaccinia virus is a strain selected from the group consisting of Copenhagen, Western Reserve, Wyeth, Lister, EM63, ACAM2000, LC16m8, CV-1, modified vaccinia Ankara (MVA), Dairen I, GLV-1h68, IHD-J, L-IVP, LC16m8, LC16mO, Tashkent, Tian Tan, and WAU86/88-1.
[0936] 243. The recombinant orthopoxvirus vector of embodiment 241, wherein said vaccinia virus is a strain selected from the group consisting of Copenhagen, Western Reserve, Tian Tan, Wyeth, and Lister.
[0937] 244. The recombinant orthopoxvirus vector of embodiment 241, wherein said vaccinia virus is a Copenhagen strain vaccinia virus.
[0938] 245. The recombinant orthopoxvirus vector of any one of embodiments 141-244, wherein said deletions is a deletion of the entire polynucleotide encoding the corresponding gene.
[0939] 246. The recombinant orthopoxvirus vector of any one of embodiments 141-244, wherein each of said deletions is a deletion of a portion of the polynucleotide encoding the corresponding gene, and wherein said deletion is sufficient to render said gene nonfunctional upon introduction into a host cell.
[0940] 247. The recombinant orthopoxvirus vector of any one of embodiments 14141-246, wherein said vector further comprises a transgene encoding a tumor-associated antigen.
[0941] 248. The recombinant orthopoxvirus vector of any one of embodiments 141-247, wherein said recombinant orthopoxvirus vector further comprises a transgene encoding a tumor-associated antigen.
[0942] 249. The recombinant orthopoxvirus vector of embodiment 248, wherein said tumor-associated antigen is a tumor-associated antigen listed in any one of Tables 3-30.
[0943] 250. The recombinant orthopoxvirus vector of embodiment 248, wherein said tumor-associated antigen is a tumor-associated antigen selected from the group consisting of CD19, CD33, EpCAM, CEA, PSMA, EGFRvIII, CD274, EGFR, CDH19, ENPP3, DLL3, MSLN, ROR1, HER2, HLAA2, EpHA2, EpHA3, MCSP, CSPG4, NG2, RON, FLT3, BCMA, CD20, FAPα, FRα, CA-9, PDGFRα, PDGFRβ, FSP1, S100A4, ADAM12m, RET, MET, FGFR, INSR, and NTRK.
[0944] 251. The recombinant orthopoxvirus vector of embodiment 248, wherein said tumor-associated antigen comprises MAGE-A3, or one or more fragments thereof.
[0945] 252. The recombinant orthopoxvirus vector of embodiment 248, wherein said tumor-associated antigen comprises NY-ESO-1, or one or more fragments thereof.
[0946] 253. The recombinant orthopoxvirus vector of embodiment 248, wherein said tumor-associated antigen comprises one or more human papillomavirus (HPV) proteins, or fragments thereof.
[0947] 254. The recombinant orthopoxvirus vector of embodiment 248, wherein said tumor-associated antigen comprises (i) E6 and E7 proteins, or fragments thereof, of HPV16 and (ii) E6 and E7 proteins, or fragments thereof, of HPV18.
[0948] 255. The recombinant orthopoxvirus vector of embodiment 248, wherein said tumor-associated antigen comprises brachyury or one or more fragments thereof.
[0949] 256. The recombinant orthopoxvirus vector of embodiment 248, wherein said tumor-associated antigen comprises prostatic acid phosphatase, or one or more fragments thereof.
[0950] 257. A method of producing the recombinant orthopoxvirus vector of any one of embodiments 248-256, said method comprising:
   [0951] d. introducing a transposon insertion site into the recombinant orthopoxvirus vector of any one of embodiments 141-247;
   [0952] e. contacting the recombinant orthopoxvirus vector formed in (a) with a transposable element comprising a gene encoding said tumor-associated antigen, thereby introducing said gene into said recombinant orthopoxvirus vector; and
   [0953] f. recovering the recombinant orthopoxvirus vector formed in (b).
[0954] 258. The recombinant orthopoxvirus vector of any one of embodiments 141-256, wherein said recombinant orthopoxvirus vector further comprises a transgene encoding an immune checkpoint inhibitor.
[0955] 259. The recombinant orthopoxvirus vector of embodiment 258, wherein said immune checkpoint inhibitor is selected from the group consisting of OX40 ligand, ICOS ligand, anti-CD47 antibody or antigen-binding fragment thereof, anti-CD40/CD40L antibody or antigen-binding fragment thereof, anti-Lag3 antibody or antigen-binding fragment thereof, anti-CTLA-4 antibody or antigen-binding fragment thereof, anti-PD-L1 antibody or antigen-binding fragment thereof, anti-PD1 antibody or antigen-binding fragment thereof, and anti-Tim-3 antibody or antigen-binding fragment thereof.
[0956] 260. The recombinant orthopoxvirus vector of embodiment 258, wherein said immune checkpoint inhibitor is an anti-PD-L1 antibody or antigen-binding fragment thereof or an anti-CTLA-4 antibody or antigen-binding fragment thereof.
[0957] 261. The recombinant orthopoxvirus vector of embodiment 258, wherein said immune checkpoint inhibitor is an anti-PD1 antibody or antigen-binding fragment thereof.
[0958] 262. The recombinant orthopoxvirus vector of embodiment 258, wherein said immune checkpoint inhibitor is an anti-CTLA-4 antibody or antigen-binding fragment thereof.
[0959] 263. A method of producing the recombinant orthopoxvirus vector of any one of embodiments 258-262, said method comprising:
   [0960] d. introducing a transposon insertion site into the recombinant orthopoxvirus vector of any one of embodiments 141-257;
   [0961] e. contacting the recombinant orthopoxvirus vector formed in (a) with a transposable element comprising a gene encoding said immune checkpoint inhibitor, thereby introducing said gene into said recombinant orthopoxvirus vector; and
   [0962] f. recovering the recombinant orthopoxvirus vector formed in (b).
[0963] 264. The recombinant orthopoxvirus vector of any one of embodiments 141-256 and 258-262, wherein said recombinant orthopoxvirus vector further comprises a transgene encoding an interleukin (IL).
[0964] 265. The recombinant orthopoxvirus vector of embodiment 264, wherein said interleukin is selected from the group consisting of
[0965] IL-1 alpha, IL-1 beta, IL-2, IL-4, IL-7, IL-10, IL-12 p35, IL-12 p40, IL-12 p70, IL-15, IL-18, IL-21, and IL-23.
[0966] 266. The recombinant orthopoxvirus vector of embodiment 264, wherein said interleukin is selected from the group consisting of IL-12 p35, IL-12 p40, and IL-12 p70.
[0967] 267. The recombinant orthopoxvirus vector of embodiment 266, wherein said interleukin is membrane-bound.
[0968] 268. A method of producing the recombinant orthopoxvirus vector of one of embodiments 264-267, said method comprising:
   [0969] d. introducing a transposon insertion site into the recombinant orthopoxvirus vector of any one of embodiments 141-256 and 258-262;
   [0970] e. contacting the recombinant orthopoxvirus vector formed in (a) with a transposable element comprising a gene encoding said interleukin, thereby introducing said gene into said recombinant orthopoxvirus vector; and
   [0971] f. recovering the recombinant orthopoxvirus vector formed in (b).
[0972] 269. The recombinant orthopoxvirus vector of any one of embodiments 141-256, 258-262, and 264-267, wherein said recombinant orthopoxvirus vector further comprises a transgene encoding an interferon (IFN).
[0973] 270. The recombinant orthopoxvirus vector of embodiment 269, wherein said interferon is selected from the group consisting of IFN-alpha, IFN-beta, IFN-delta, IFN-epsilon, IFN-tau, IFN-omega, IFN-zeta, and IFN-gamma.
[0974] 271. A method of producing the recombinant orthopoxvirus vector of embodiment 269 or 270, said method comprising:
   [0975] d. introducing a transposon insertion site into the recombinant orthopoxvirus vector of any one of embodiments 141-256, 258-262, and 264-267;
   [0976] e. contacting the recombinant orthopoxvirus vector formed in (a) with a transposable element comprising a gene encoding said interferon, thereby introducing said gene into said recombinant orthopoxvirus vector; and
   [0977] f. recovering the recombinant orthopoxvirus vector formed in (b).
[0978] 272. The recombinant orthopoxvirus vector of any one of embodiments 141-256, 258-262, 264-267, 269, and 270, wherein said recombinant orthopoxvirus vector further comprises a transgene encoding a TNF superfamily member protein.
[0979] 273. The recombinant orthopoxvirus vector of embodiment 272, wherein said TNF superfamily member protein is selected from the group consisting of TRAIL, Fas ligand, LIGHT (TNFSF-14), TNF-alpha, and 4-1BB ligand.
[0980] 274. A method of producing the recombinant orthopoxvirus vector of embodiment 272 or 273, said method comprising:
   [0981] d. introducing a transposon insertion site into the recombinant orthopoxvirus vector of any one of embodiments 141-256, 258-262, 264-267, 269, and 270;
   [0982] e. contacting the recombinant orthopoxvirus vector formed in (a) with a transposable element comprising a gene encoding said TNF superfamily member protein, thereby introducing said gene into said recombinant orthopoxvirus vector; and
   [0983] f. recovering the recombinant orthopoxvirus vector formed in (b).
[0984] 275. The recombinant orthopoxvirus vector of any one of embodiments 141-256, 258-262, 264-267, 269, 270, 272, and 273 wherein said recombinant orthopoxvirus vector further comprises a transgene encoding a cytokine.
[0985] 276. The recombinant orthopoxvirus vector of embodiment 275, wherein said cytokine is selected from the group consisting of GM-CSF, Flt3 ligand, CD40 ligand, anti-TGF-beta, anti-VEGF-R2, and cGAS (guanyl adenylate cyclase).
[0986] 277. The recombinant orthopoxvirus vector of embodiment 275, wherein said cytokine is Flt3 ligand.
[0987] 278. A method of producing the recombinant orthopoxvirus vector of embodiment 276 or 277, said method comprising:
   [0988] d. introducing a transposon insertion site into the recombinant orthopoxvirus vector of any one of embodiments 141-256, 258-262, 264-267, 269, 270, 272, and 273;
   [0989] e. contacting the recombinant orthopoxvirus vector formed in (a) with a transposable element comprising a gene encoding said cytokine, thereby introducing said gene into said recombinant orthopoxvirus vector; and
   [0990] f. recovering the recombinant orthopoxvirus vector formed in (b).
[0991] 279. The recombinant orthopoxvirus vector of any one of embodiments 141-256, 258-262, 264-267, 269, 270, 272, 273, and 275-277, wherein said recombinant orthopoxvirus vector further comprises a transgene encoding microRNA (miRNA).
[0992] 280. The recombinant orthopoxvirus vector of embodiment 279, wherein said miRNA is mir-6.
[0993] 281. A method of producing the recombinant orthopoxvirus vector of embodiment 279 or 280, said method comprising:
   [0994] d. introducing a transposon insertion site into the recombinant orthopoxvirus vector of any one of embodiments 141-256, 258-262, 264-267, 269, 270, 272, 273, and 275-277;
   [0995] e. contacting the recombinant orthopoxvirus vector formed in (a) with a transposable element comprising a gene encoding said miRNA, thereby introducing said gene into said recombinant orthopoxvirus vector; and
   [0996] f. recovering the recombinant orthopoxvirus vector formed in (b).
[0997] 282. The nucleic acid of any one of embodiments 1-115, 117-121, 123-126, 128, 129, 131, 132, 134-136, 138, and 139, or the recombinant orthopoxvirus vector of any one of embodiments 141-256, 258-262, 264-267, 269, 270, 272, 273, 275-277, 279, and 280, wherein said nucleic acid or said recombinant orthopoxvirus vector comprises the Thymidine Kinase (TK) gene.
[0998] 283. The nucleic acid of any one of embodiments 1-115, 117-121, 123-126, 128, 129, 131, 132, 134-136, 138, 139, and 282, or the recombinant orthopoxvirus vector of any one of embodiments 141-256, 258-262, 264-267, 269, 270, 272, 273, 275-277, 279, 280, and 282, wherein said nucleic acid or said recombinant orthopoxvirus vector comprises the ribonucleotide reductase gene.
[0999] 284. The nucleic acid of any one of embodiments 1-115, 117-121, 123-126, 128, 129, 131, 132, 134-136, 138, 139, 282, and 283, or the recombinant orthopoxvirus vector of any one of embodiments 141-256, 258-262, 264-267, 269, 270, 272, 273, 275-277, 279, 280, 282, and 283, wherein upon contacting a population of mammalian cells with said nucleic acid or said recombinant orthopoxvirus vector, the cells exhibit increased syncytia formation relative to a population of mammalian cells of the same type contacted with a form of the orthopoxvirus vector that does not comprise said deletions.
[1000] 285. The nucleic acid of any one of embodiments 1-115, 117-121, 123-126, 128, 129, 131, 132, 134-136, 138, 139, and 282-284 or the recombinant orthopoxvirus vector of any one of embodiments 141-256, 258-262, 264-267, 269, 270, 272, 273, 275-277, 279, 280, and 282-284, wherein upon contacting a population of mammalian cells with said nucleic acid or said recombinant orthopoxvirus vector, the cells exhibit increased spreading of the orthopoxvirus vector relative to a population of mammalian cells of the same type contacted with a form of the orthopoxvirus vector that does not comprise said deletions.
[1001] 286. The nucleic acid of any one of embodiments 1-115, 117-121, 123-126, 128, 129, 131, 132, 134-136, 138, 139, and 282-285, or the recombinant orthopoxvirus vector of any one of embodiments 141-256, 258-262, 264-267, 269, 270, 272, 273, 275-277, 279, 280, and 282-285, wherein said nucleic acid or said recombinant orthopoxvirus vector exerts an increased cytotoxic effect on a population of mammalian cells relative to that of a form of the orthopoxvirus vector that does not comprise said deletions.
[1002] 287. The nucleic acid or the recombinant orthopoxvirus vector of any one of embodiments 284-286, wherein said mammalian cells are human cells.
[1003] 288. The nucleic acid or the recombinant orthopoxvirus vector of embodiment 287, wherein said human cells are cancer cells.
[1004] 289. The nucleic acid or the recombinant orthopoxvirus vector of any one of embodiments 284-286, wherein said mammalian cells are from a cell line selected from the group consisting of U2OS, 293, 293T, Vero, HeLa, A549, BHK, BSC40, CHO, OVCAR-8, 786-0, NCI-H23, U251, SF-295, T-47D, SKMEL2, BT-549, SK-MEL-28, MDA-MB-231, SK-OV-3, MCF7, M14, SF-268, CAKI-1, HPAV, OVCAR-4, HCT15, K-562, and HCT-116.
[1005] 290. A packaging cell line comprising the nucleic acid of any one of embodiments 1-115, 117-121, 123-126, 128, 129, 131, 132, 134-136, 138, 139, and 282-289 or the recombinant orthopoxvirus vector of any one of embodiments 141-256, 258-262, 264-267, 269, 270, 272, 273, 275-277, 279, 280, and 282-289.
[1006] 291. A method of treating cancer in a mammalian patient, said method comprising administering a therapeutically effective amount of the nucleic acid of any one of embodiments 1-115, 117-121, 123-126, 128, 129, 131, 132, 134-136, 138, 139, and 282-289, or the recombinant orthopoxvirus vector of any one of embodiments 141-256, 258-262, 264-267, 269, 270, 272, 273, 275-277, 279, 280, and 282-289 to said patient.
[1007] 292. The method of embodiment 291, wherein said mammalian patient is a human patient.
[1008] 293. The method of embodiment 291 or 292, wherein said cancer is selected from the group consisting of leukemia, lymphoma, liver cancer, bone cancer, lung cancer, brain cancer, bladder cancer, gastrointestinal cancer, breast cancer, cardiac cancer, cervical cancer, uterine cancer, head and neck cancer, gallbladder cancer, laryngeal cancer, lip and oral cavity cancer, ocular cancer, melanoma, pancreatic cancer, prostate cancer, colorectal cancer, testicular cancer, and throat cancer.
[1009] 294. The method of embodiment 291 or 292, wherein said cancer is selected from the group consisting of acute lymphoblastic leukemia (ALL), acute myeloid leukemia (AML), chronic lymphocytic leukemia (CLL), chronic myelogenous leukemia (CML), adrenocortical carcinoma, AIDS-related lymphoma, primary CNS lymphoma, anal cancer, appendix cancer, astrocytoma, atypical teratoid/rhabdoid tumor, basal cell carcinoma, bile duct cancer, extrahepatic cancer, ewing sarcoma family, osteosarcoma and malignant fibrous histiocytoma, central nervous system embryonal tumors, central nervous system germ cell tumors, craniopharyngioma, ependymoma, bronchial tumors, burkitt lymphoma, carcinoid tumor, primary lymphoma, chordoma, chronic myeloproliferative neoplasms, colon cancer, extrahepatic bile duct cancer, ductal carcinoma in situ (DCIS), endometrial cancer, ependymoma, esophageal cancer, esthesioneuroblastoma, extracranial germ cell tumor, extragonadal germ cell tumor, fallopian tube cancer, fibrous histiocytoma of bone, gastrointestinal carcinoid tumor, gastrointestinal stromal tumors (GIST), testicular germ cell tumor, gestational trophoblastic disease, glioma, childhood brain stem glioma, hairy cell leukemia, hepatocellular cancer, langerhans cell histiocytosis, hodgkin lymphoma, hypopharyngeal cancer, islet cell tumors, pancreatic neuroendocrine tumors, wilms tumor and other childhood kidney tumors, langerhans cell histiocytosis, small cell lung cancer, cutaneous T cell lymphoma, intraocular melanoma, merkel cell carcinoma, mesothelioma, metastatic squamous neck cancer, midline tract carcinoma, multiple endocrine neoplasia syndromes, multiple myeloma/plasma cell neoplasm, myelodysplastic syndromes, nasal cavity and paranasal sinus cancer, nasopharyngeal cancer, neuroblastoma, non-hodgkin lymphoma (NHL), non-small cell lung cancer (NSCLC), epithelial ovarian cancer, germ cell ovarian cancer, low malignant potential ovarian cancer, pancreatic neuroendocrine tumors, papillomatosis, paraganglioma, paranasal sinus and nasal cavity cancer, parathyroid cancer, penile cancer, pharyngeal cancer, pheochromocytoma, pituitary tumor, pleuropulmonary blastoma, primary peritoneal cancer, rectal cancer, retinoblastoma, rhabdomyosarcoma, salivary gland cancer, kaposi sarcoma, rhabdomyosarcoma, sézary syndrome, small intestine cancer, soft tissue sarcoma, throat cancer, thymoma and thymic carcinoma, thyroid cancer, transitional cell cancer of the renal pelvis and ureter, urethral cancer, endometrial uterine cancer, uterine sarcoma, vaginal cancer, vulvar cancer, and Waldenstrom macroglobulinemia.
[1010] 295. The method of any one of embodiments 291-294, wherein said method further comprises administering to said patient an immune checkpoint inhibitor.
[1011] 296. The method of embodiment 295, wherein said immune checkpoint inhibitor is selected from the group consisting of OX40 ligand, ICOS ligand, anti-CD47 antibody or antigen-binding fragment thereof, anti-CD40/CD40L antibody or antigen-binding fragment thereof, anti-Lag3 antibody or antigen-binding fragment thereof, anti-CTLA-4 antibody or antigen-binding fragment thereof, anti-PD-L1 antibody or antigen-binding fragment thereof, anti-PD1 antibody or antigen-binding fragment thereof, and anti-Tim-3 antibody or antigen-binding fragment thereof.
[1012] 297. The method of embodiment 295, wherein said immune checkpoint inhibitor is an anti-PD1 antibody or antigen-binding fragment thereof or an anti-CTLA-4 antibody or antigen-binding fragment thereof.
[1013] 298. The method of embodiment 295, wherein said immune checkpoint inhibitor is an anti-PD1 antibody or antigen-binding fragment thereof.
[1014] 299. The method of embodiment 295, wherein said immune checkpoint inhibitor is an anti-CTLA-4 antibody or antigen-binding fragment thereof.
[1015] 300. The method of any one of embodiments 291-299, wherein said method further comprises administering to said patient an interleukin.
[1016] 301. The method of embodiment 300, wherein said interleukin is selected from the group consisting of IL-1 alpha, IL-1 beta, IL-2, IL-4, IL-7, IL-10, IL-12 p35, IL-12 p40, IL-12 p70, IL-15, IL-18, IL-21, and IL-23.
[1017] 302. The method of embodiment 300, wherein said interleukin is selected from the group consisting of IL-12 p35, IL-12 p40, and IL-12 p70.
[1018] 303. The method of embodiment 301 or 302, wherein said interleukin is membrane-bound.
[1019] 304. The method of any one of embodiments 291-303, wherein said method further comprises administering to said patient an interferon.
[1020] 305. The method of embodiment 304, wherein said interferon is selected from the group consisting of
[1021] IFN-alpha, IFN-beta, IFN-delta, IFN-epsilon, IFN-tau, IFN-omega, IFN-zeta, and IFN-gamma.
[1022] 306. The method of any one of embodiments 291-305, wherein said method further comprises administering to said patient a TNF superfamily member protein.
[1023] 307. The method of embodiment 306, wherein said TNF superfamily member protein is selected from the group consisting of TRAIL, Fas ligand, LIGHT (TNFSF-14), TNF-alpha, and 4-1BB ligand.
[1024] 308. The method of any one of embodiments 291-307, wherein said method further comprises administering to said patient a cytokine.
[1025] 309. The method of embodiment 308, wherein said cytokine is selected from the group consisting of GM-CSF, Flt3 ligand, CD40 ligand, anti-TGF-beta, anti-VEGF-R2, and cGAS (guanyl adenylate cyclase).
[1026] 310. The method of embodiment 308, wherein said cytokine is Flt3 ligand.
[1027] 311. The method of any one of embodiments 291-310, wherein said method further comprises administering to said patient a miRNA.
[1028] 312. The method of embodiment 311, wherein said miRNA is mir-6.
[1029] 313. A kit comprising the nucleic acid of any one of embodiments 1-115, 117-121, 123-126, 128, 129, 131, 132, 134-136, 138, 139, and 282-289 or the recombinant orthopoxvirus vector of any one of embodiments 141-256, 258-262, 264-267, 269, 270, 272, 273, 275-277, 279, 280, and 282-289 and a package insert instructing a user of said kit to express said nucleic acid or said vector in a host cell.
[1030] 314. A kit comprising the nucleic acid of any one of embodiments 1-115, 117-121, 123-126, 128, 129, 131, 132, 134-136, 138, 139, and 282-289 or the recombinant orthopoxvirus vector of any one of embodiments 141-256, 258-262, 264-267, 269, 270, 272, 273, 275-277, 279, 280, and 282-289 and a package insert instructing a user to administer a therapeutically effective amount of said nucleic acid or recombinant orthopoxvirus vector to a mammalian patient having cancer, thereby treating said cancer.
[1031] 315. The kit of embodiment 314, wherein said mammalian patient is a human patient.
[1032] 316. The orthopox virus of any of the preceding embodiments wherein the B8R gene is deleted.
[1033] 317. The orthopox virus of embodiment 316, wherein at least one transgene is inserted into the locus of the deleted B8R gene. 0

[1034] 318. The orthopox virus of embodiment 317, wherein at least two transgenes are inserted into the locus of the deleted B8R gene.
[1035] 319. The orthopox virus of embodiment 318, wherein at least three transgenes are inserted into the locus of the deleted B8R gene.
[1036] 320. The orthopox virus of any one of embodiments 316-319, wherein at least one additional transgene is inserted at locus that is not the locus of the B8R gene.
[1037] 321. The orthopox virus of embodiment 320, wherein the locus is the boundary of the 5p deletion.
[1038] 322. The orthopox virus of embodiment 321, wherein the locus is the boundary of the 3p deletion.
[1039] 323. The orthopox virus of embodiments 316-322, wherein at least one of the following transgenes is inserted: IL-12TM, FLT3-L or anti-CLTA-4 antibody.
[1040] 324. The orthopox virus of embodiment 323, wherein the IL-12-TM and FLT3-L genes are inserted into the locus of the deleted B8R gene.
[1041] 325. The orthopox virus of any one of embodiments 323-324, wherein the anti-CLTA-4 antibody is inserted within the boundary of the 5p deletion.
[1042] 326. The orthopox virus of anyone of embodiments 323-325, wherein the virus comprises the sequence of SEQ ID. NO: 210.
[1043] 326. The orthopox virus of any one of embodiments 323-325 wherein the anti-CLTA antibody is SEQ ID NO: 211.
[1044] 327. The orthopox virus of any one of embodiments 323-326, wherein the IL-12-TM is SEQ ID NO: 212.
[1045] 328. The orthopox virus of any one of embodiments 323-327 wherein the FLT3-L is SEQ ID NO: 213.
[1046] 329. An orthopox virus comprising a nucleic acid sequence wherein the nucleic acid sequence is a derivative of SEQ ID NO: 210,
   [1047] wherein said derivative comprises a deletion of the B8R gene of SEQ ID NO: 210,
   [1048] wherein, an IL-12-TM and an FLT3-L transgene are inserted into the locus of said deleted B8R gene,
   [1049] wherein, genes encoding a heavy and a light chain of an anti-CLTA-4 antibody are inserted within the boundaries of the 5p deletion present in SEQ ID NO: 210;
   [1050] wherein the IL-12-TM is SEQ ID NO: 212;
   [1051] wherein the FLT3-L is SEQ ID NO: 213; and
   [1052] wherein the anti-CLTA4 antibody is encoded by SEQ ID NO: 211.

### 5.7.2. Sett

[1053] 1. A nucleic acid comprising a recombinant orthopoxvirus genome, wherein said recombinant orthopoxvirus genome comprises a deletion of at least 2 genes selected from the group consisting of the C2L, C1L, N1L, N2L, M1L, M2L, K1L, K2L, K3L, K4L, K5L, K6L, K7R, F1L, F2L, F3L, B14R, B15R, B16R, B17L, B18R, B19R, and B20R genes.
[1054] 2. The nucleic acid of embodiment 1, wherein said recombinant orthopoxvirus genome comprises a deletion of at least 3 genes, each gene selected from the group consisting of the C2L, C1L, N1L, N2L, M1L, M2L, K1L, K2L, K3L, K4L, K5L, K6L, K7R, F1L, F2L, F3L, B14R, B15R, B16R, B17L, B18R, B19R, and B20R genes.
[1055] 3. The nucleic acid of embodiment 2, wherein said recombinant orthopoxvirus genome comprises a deletion of at least 4 genes, each gene selected from the group consisting of the C2L, C1L, N1L, N2L, M1L, M2L, K1L, K2L, K3L, K4L, K5L, K6L, K7R, F1L, F2L, F3L, B14R, B15R, B16R, B17L, B18R, B19R, and B20R genes.
[1056] 4. The nucleic acid of embodiment 3, wherein said recombinant orthopoxvirus genome comprises a deletion of at least 5 genes, each gene selected from the group consisting of the C2L, C1L, N1L, N2L, M1L, M2L, K1L, K2L, K3L, K4L, K5L, K6L, K7R, F1L, F2L, F3L, B14R, B15R, B16R, B17L, B18R, B19R, and B20R genes.
[1057] 5. The nucleic acid of embodiment 4, wherein said recombinant orthopoxvirus genome comprises a deletion of at least 6 genes, each gene selected from the group consisting of the C2L, C1L, N1L, N2L, M1L, M2L, K1L, K2L, K3L, K4L, K5L, K6L, K7R, F1L, F2L, F3L, B14R, B15R, B16R, B17L, B18R, B19R, and B20R genes.
[1058] 6. The nucleic acid of embodiment 5, wherein said recombinant orthopoxvirus genome comprises a deletion of at least 7 genes, each gene selected from the group consisting of the C2L, C1L, N1L, N2L, M1L, M2L, K1L, K2L, K3L, K4L, K5L, K6L, K7R, F1L, F2L, F3L, B14R, B15R, B16R, B17L, B18R, B19R, and B20R genes.
[1059] 7. The nucleic acid of embodiment 6, wherein said recombinant orthopoxvirus genome comprises a deletion of at least 8 genes, each gene selected from the group consisting of the C2L, C1L, N1L, N2L, M1L, M2L, K1L, K2L, K3L, K4L, K5L, K6L, K7R, F1L, F2L, F3L, B14R, B15R, B16R, B17L, B18R, B19R, and B20R genes.
[1060] 8. The nucleic acid of embodiment 7, wherein said recombinant orthopoxvirus genome comprises a deletion of at least 9 genes, each gene selected from the group consisting of the C2L, C1L, N1L, N2L, M1L, M2L, K1L, K2L, K3L, K4L, K5L, K6L, K7R, F1L, F2L, F3L, B14R, B15R, B16R, B17L, B18R, B19R, and B20R genes.
[1061] 9. The nucleic acid of embodiment 8, wherein said recombinant orthopoxvirus genome comprises a deletion of at least 10 genes, each gene selected from the group consisting of the C2L, C1L, N1L, N2L, M1L, M2L, K1L, K2L, K3L, K4L, K5L, K6L, K7R, F1L, F2L, F3L, B14R, B15R, B16R, B17L, B18R, B19R, and B20R genes.
[1062] 10. The nucleic acid of embodiment 9, wherein said recombinant orthopoxvirus genome comprises a deletion of at least 11 genes, each gene selected from the group consisting of the C2L, C1L, N1L, N2L, M1L, M2L, K1L, K2L, K3L, K4L, K5L, K6L, K7R, F1L, F2L, F3L, B14R, B15R, B16R, B17L, B18R, B19R, and B20R genes.
[1063] 11. The nucleic acid of embodiment 10, wherein said recombinant orthopoxvirus genome comprises a deletion of at least 12 genes, each gene selected from the group consisting of the C2L, C1L, N1L, N2L, M1L, M2L, K1L, K2L, K3L, K4L, K5L, K6L, K7R, F1L, F2L, F3L, B14R, B15R, B16R, B17L, B18R, B19R, and B20R genes.
[1064] 12. The nucleic acid of embodiment 11, wherein said recombinant orthopoxvirus genome comprises a deletion of at least 13 genes, each gene selected from the group consisting of the C2L, C1L, N1L, N2L, M1L, M2L, K1L, K2L, K3L, K4L, K5L, K6L, K7R, F1L, F2L, F3L, B14R, B15R, B16R, B17L, B18R, B19R, and B20R genes.
[1065] 13. The nucleic acid of embodiment 12, wherein said recombinant orthopoxvirus genome comprises a deletion of at least 14 genes, each gene selected from the group consisting of the C2L, C1L, N1L, N2L, M1L, M2L, K1L, K2L, K3L, K4L, K5L, K6L, K7R, F1L, F2L, F3L, B14R, B15R, B16R, B17L, B18R, B19R, and B20R genes.
[1066] 14. The nucleic acid of embodiment 13, wherein said recombinant orthopoxvirus genome comprises a deletion of at least 15 genes, each gene selected from the group consisting of the C2L, C1L, N1L, N2L, M1L, M2L, K1L, K2L, K3L, K4L, K5L, K6L, K7R, F1L, F2L, F3L, B14R, B15R, B16R, B17L, B18R, B19R, and B20R genes.
[1067] 15. The nucleic acid of embodiment 14, wherein said recombinant orthopoxvirus genome comprises a deletion of at least 16 genes, each gene selected from the group consisting of the C2L, C1L, N1L, N2L, M1L, M2L, K1L, K2L, K3L, K4L, K5L, K6L, K7R, F1L, F2L, F3L, B14R, B15R, B16R, B17L, B18R, B19R, and B20R genes.
[1068] 16. The nucleic acid of embodiment 15, wherein said recombinant orthopoxvirus genome comprises a deletion of at least 17 genes, each gene selected from the group consisting of the C2L, C1L, N1L, N2L, M1L, M2L, K1L, K2L, K3L, K4L, K5L, K6L, K7R, F1L, F2L, F3L, B14R, B15R, B16R, B17L, B18R, B19R, and B20R genes.
[1069] 17. The nucleic acid of embodiment 16, wherein said recombinant orthopoxvirus genome comprises a deletion of at least 18 genes, each gene selected from the group consisting of the C2L, C1L, N1L, N2L, M1L, M2L, K1L, K2L, K3L, K4L, K5L, K6L, K7R, F1L, F2L, F3L, B14R, B15R, B16R, B17L, B18R, B19R, and B20R genes.
[1070] 18. The nucleic acid of embodiment 17, wherein said recombinant orthopoxvirus genome comprises a deletion of at least 19 genes, each gene selected from the group consisting of the C2L, C1L, N1L, N2L, M1L, M2L, K1L, K2L, K3L, K4L, K5L, K6L, K7R, F1L, F2L, F3L, B14R, B15R, B16R, B17L, B18R, B19R, and B20R genes.
[1071] 19. The nucleic acid of embodiment 18, wherein said recombinant orthopoxvirus genome comprises a deletion of at least 20 genes, each gene selected from the group consisting of the C2L, C1L, N1L, N2L, M1L, M2L, K1L, K2L, K3L, K4L, K5L, K6L, K7R, F1L, F2L, F3L, B14R, B15R, B16R, B17L, B18R, B19R, and B20R genes.
[1072] 20. The nucleic acid of embodiment 19, wherein said recombinant orthopoxvirus genome comprises a deletion of at least 21 genes, each gene selected from the group consisting of the C2L, C1L, N1L, N2L, M1L, M2L, K1L, K2L, K3L, K4L, K5L, K6L, K7R, F1L, F2L, F3L, B14R, B15R, B16R, B17L, B18R, B19R, and B20R genes.
[1073] 21. The nucleic acid of embodiment 20, wherein said recombinant orthopoxvirus genome comprises a deletion of at least 22 genes, each gene selected from the group consisting of the C2L, C1L, N1L, N2L, M1L, M2L, K1L, K2L, K3L, K4L, K5L, K6L, K7R, F1L, F2L, F3L, B14R, B15R, B16R, B17L, B18R, B19R, and B20R genes.
[1074] 22. The nucleic acid of embodiment 21, wherein said recombinant orthopoxvirus genome comprises a deletion of each of the C2L, C1L, N1L, N2L, M1L, M2L, K1L, K2L, K3L, K4L, K5L, K6L, K7R, F1L, F2L, F3L, B14R, B15R, B16R, B17L, B18R, B19R, and B20R genes.
[1075] 23. A nucleic acid comprising a recombinant orthopoxvirus genome, wherein said recombinant orthopoxvirus genome comprises a deletion of at least 1 gene selected from the group consisting of the B14R, B15R, B16R, B17L, B18R, B19R, and B20R genes.
[1076] 24. The nucleic acid of embodiment 23, wherein said recombinant orthopoxvirus genome comprises a deletion of at least 2 genes, each gene selected from the group consisting of the B14R, B15R, B16R, B17L, B18R, B19R, and B20R genes.
[1077] 25. The nucleic acid of embodiment 24, wherein said recombinant orthopoxvirus genome comprises a deletion of at least 3 genes, each gene selected from the group consisting of the B14R, B15R, B16R, B17L, B18R, B19R, and B20R genes.
[1078] 26. The nucleic acid of embodiment 25, wherein said recombinant orthopoxvirus genome comprises a deletion of at least 4 genes, each gene selected from the group consisting of the B14R, B15R, B16R, B17L, B18R, B19R, and B20R genes.
[1079] 27. The nucleic acid of embodiment 26, wherein said recombinant orthopoxvirus genome comprises a deletion of at least 5 genes, each gene selected from the group consisting of the B14R, B15R, B16R, B17L, B18R, B19R, and B20R genes.
[1080] 28. The nucleic acid of embodiment 27, wherein said recombinant orthopoxvirus genome comprises a deletion of at least 6 genes, each gene selected from the group consisting of the B14R, B15R, B16R, B17L, B18R, B19R, and B20R genes.
[1081] 29. The nucleic acid of embodiment 28, wherein said recombinant orthopoxvirus genome comprises a deletion of each of the B14R, B15R, B16R, B17L, B18R, B19R, and B20R genes.
[1082] 30. A nucleic acid comprising a recombinant orthopoxvirus genome, wherein said recombinant orthopoxvirus genome comprises a deletion of at least 1 gene selected from the group consisting of the C2L, C1L, N1L, N2L, M1L, M2L, K1L, K2L, K3L, K4L, K5L, K6L, K7R, F1L, F2L, and F3L genes.
[1083] 31. The nucleic acid of embodiment 30, wherein said recombinant orthopoxvirus genome comprises a deletion of at least 2 genes, each gene selected from the group consisting of the C2L, C1L, N1L, N2L, M1L, M2L, K1L, K2L, K3L, K4L, K5L, K6L, K7R, F1L, F2L, and F3L genes.
[1084] 32. The nucleic acid of embodiment 31, wherein said recombinant orthopoxvirus genome comprises a deletion of at least 3 genes, each gene selected from the group consisting of the C2L, C1L, N1L, N2L, M1L, M2L, K1L, K2L, K3L, K4L, K5L, K6L, K7R, F1L, F2L, and F3L genes.
[1085] 33. The nucleic acid of embodiment 32, wherein said recombinant orthopoxvirus genome comprises a deletion of at least 4 genes, each gene selected from the group consisting of the C2L, C1L, N1L, N2L, M1L, M2L, K1L, K2L, K3L, K4L, K5L, K6L, K7R, F1L, F2L, and F3L genes.
[1086] 34. The nucleic acid of embodiment 33, wherein said recombinant orthopoxvirus genome comprises a deletion of at least 5 genes, each gene selected from the group consisting of the C2L, C1L, N1L, N2L, M1L, M2L, K1L, K2L, K3L, K4L, K5L, K6L, K7R, F1L, F2L, and F3L genes.
[1087] 35. The nucleic acid of embodiment 34, wherein said recombinant orthopoxvirus genome comprises a deletion of at least 6 genes, each gene selected from the group consisting of the C2L, C1L, N1L, N2L, M1L, M2L, K1L, K2L, K3L, K4L, K5L, K6L, K7R, F1L, F2L, and F3L genes.
[1088] 36. The nucleic acid of embodiment 35, wherein said recombinant orthopoxvirus genome comprises a deletion of at least 7 genes, each gene selected from the group consisting of the C2L, C1L, N1L, N2L, M1L, M2L, K1L, K2L, K3L, K4L, K5L, K6L, K7R, F1L, F2L, and F3L genes.
[1089] 37. The nucleic acid of embodiment 36, wherein said recombinant orthopoxvirus genome comprises a deletion of at least 8 genes, each gene selected from the group consisting of the C2L, C1L, N1L, N2L, M1L, M2L, K1L, K2L, K3L, K4L, K5L, K6L, K7R, F1L, F2L, and F3L genes.
[1090] 38. The nucleic acid of embodiment 37, wherein said recombinant orthopoxvirus genome comprises a deletion of at least 9 genes, each gene selected from the group consisting of the C2L, C1L, N1L, N2L, M1L, M2L, K1L, K2L, K3L, K4L, K5L, K6L, K7R, F1L, F2L, and F3L genes.
[1091] 39. The nucleic acid of embodiment 38, wherein said recombinant orthopoxvirus genome comprises a deletion of at least 10 genes, each gene selected from the group consisting of the C2L, C1L, N1L, N2L, M1L, M2L, K1L, K2L, K3L, K4L, K5L, K6L, K7R, F1L, F2L, and F3L genes.
[1092] 40. The nucleic acid of embodiment 39, wherein said recombinant orthopoxvirus genome comprises a deletion of at least 11 genes, each gene selected from the group consisting of the C2L, C1L, N1L, N2L, M1L, M2L, K1L, K2L, K3L, K4L, K5L, K6L, K7R, F1L, F2L, and F3L genes.
[1093] 41. The nucleic acid of embodiment 40, wherein said recombinant orthopoxvirus genome comprises a deletion of at least 12 genes, each gene selected from the group consisting of the C2L, C1L, N1L, N2L, M1L, M2L, K1L, K2L, K3L, K4L, K5L, K6L, K7R, F1L, F2L, and F3L genes.
[1094] 42. The nucleic acid of embodiment 41, wherein said recombinant orthopoxvirus genome comprises a deletion of at least 13 genes, each gene selected from the group consisting of the C2L, C1L, N1L, N2L, M1L, M2L, K1L, K2L, K3L, K4L, K5L, K6L, K7R, F1L, F2L, and F3L genes.
[1095] 43. The nucleic acid of embodiment 42, wherein said recombinant orthopoxvirus genome comprises a deletion of at least 14 genes, each gene selected from the group consisting of the C2L, C1L, N1L, N2L, M1L, M2L, K1L, K2L, K3L, K4L, K5L, K6L, K7R, F1L, F2L, and F3L genes.
[1096] 44. The nucleic acid of embodiment 43, wherein said recombinant orthopoxvirus genome comprises a deletion of at least 15 genes, each gene selected from the group consisting of the C2L, C1L, N1L, N2L, M1L, M2L, K1L, K2L, K3L, K4L, K5L, K6L, K7R, F1L, F2L, and F3L genes.
[1097] 45. The nucleic acid of embodiment 44, wherein said recombinant orthopoxvirus genome comprises a deletion of each of the C2L, C1L, N1L, N2L, M1L, M2L, K1L, K2L, K3L, K4L, K5L, K6L, K7R, F1L, F2L, and F3L genes.
[1098] 46. The nucleic acid comprising a recombinant orthopoxvirus genome of any one of embodiments 1-45, wherein said recombinant orthopoxvirus genome comprises a deletion of at least 1 gene that encodes a protein involved in host interaction.
[1099] 47. The nucleic acid of embodiment 46, wherein said protein affects calcium-independent adhesion to the extracellular matrix.
[1100] 48. The nucleic acid of embodiment 46, wherein said protein is an NF-κB inhibitor.
[1101] 49. The nucleic acid of embodiment 48, wherein said protein is encoded by a gene selected from the group consisting of the C2L, N1L, M2L, K1L, and K7R genes.
[1102] 50. The nucleic acid of embodiment 46, wherein said protein is an apoptosis inhibitor.
[1103] 51. The nucleic acid of embodiment 47, wherein said apoptosis inhibitor is a caspase-9 inhibitor.
[1104] 52. The nucleic acid of embodiment 51, wherein said caspase-9 inhibitor is encoded by the F1L gene.
[1105] 53. The nucleic acid of embodiment 50, wherein said apoptosis inhibitor is a BCL-2-like protein.
[1106] 54. The nucleic acid of embodiment 53, wherein said BCL-2-like protein is encoded by N1L.
[1107] 55. The nucleic acid of embodiment 46, wherein said protein is an interferon regulatory factor 3 (IRF3) inhibitor.
[1108] 56. The nucleic acid of embodiment 55, wherein said IRF3 inhibitor is encoded by N2L or K7R.
[1109] 57. The nucleic acid of embodiment 46, wherein said protein is a serine protease inhibitor.
[1110] 58. The nucleic acid of embodiment 46, wherein said protein prevents cell fusion.
[1111] 59. The nucleic acid of embodiment 58, wherein said protein is encoded by K2L.
[1112] 60. The nucleic acid of embodiment 46, wherein said protein is an RNA-activated protein kinase (PKR) inhibitor.
[1113] 61. The nucleic acid of embodiment 60, wherein said protein is encoded by K1L or K3L.
[1114] 62. The nucleic acid of embodiment 46, wherein said protein is a virulence factor.
[1115] 63. The nucleic acid of embodiment 63, wherein said protein is encoded by F3L.
[1116] 64. The nucleic acid of embodiment 46, wherein said protein is an IL-1-beta inhibitor.
[1117] 65. The nucleic acid of embodiment 64, wherein said protein is encoded by B16R.
[1118] 66. The nucleic acid of embodiment 46, wherein said protein is a secreted IFNα sequestor.
[1119] 67. The nucleic acid of embodiment 67, wherein said protein is encoded by B19R.
[1120] 68. The nucleic acid comprising a recombinant orthopoxvirus genome of any one of embodiments 1-67, wherein said recombinant orthopoxvirus genome comprises a deletion of at least 1 gene encoding a protein involved in DNA replication.
[1121] 69. The nucleic acid of embodiment 68, wherein said protein is a DNA modifying nuclease.
[1122] 70. The nucleic acid of embodiment 69, wherein said protein is encoded by K4L.
[1123] 71. The nucleic acid of embodiment 70, wherein said protein is a deoxyuridine triphosphatase (dUTPase).
[1124] 72. The nucleic acid of embodiment 71, wherein the dUTPase is encoded by F2L.
[1125] 73. The nucleic acid of any one of embodiments 1-72, wherein at least one deleted gene's entire nucleotide sequence is deleted.
[1126] 74. The nucleic acid of any one of embodiments 1-72, wherein at least one deleted gene is only partially deleted, and wherein the partial deletion is sufficient to render said partially deleted gene nonfunctional upon introduction into a host cell.
[1127] 75. The nucleic acid of any one of embodiments 1-74, wherein said recombinant orthopoxvirus genome comprises at least two copies of inverted terminal repeats (ITRs).
[1128] 76. The nucleic acid of any one of embodiments 1-74, wherein said recombinant orthopoxvirus genome lacks any copies of ITRs.
[1129] 77. The nucleic acid of any one of embodiments 1-74, wherein said recombinant orthopoxvirus genome comprises a deletion in at least one copy of an ITR selected from the group consisting of B21R-ITR, B22R-ITR, B23R-ITR, B24R-ITR, B25R-ITR, B26R-ITR, B27R-ITR, B28R-ITR, and B29R-ITR.
[1130] 78. The nucleic acid of any one of embodiments 1-74, wherein said recombinant orthopoxvirus genome comprises a deletion in at least all of the following copies of ITRs: B21R-ITR, B22R-ITR, B23R-ITR, B24R-ITR, B25R-ITR, B26R-ITR, B27R-ITR, B28R-ITR, and B29R-ITR.
[1131] 79. The nucleic acid of any one of embodiments 1-78, wherein said recombinant orthopoxvirus genome comprises a deletion in the B8R gene.
[1132] 80. The nucleic acid of any one of embodiments 1-78, wherein said recombinant orthopoxvirus genome comprises an intact B8R gene.
[1133] 81. A nucleic acid comprising a recombinant orthopoxvirus genome, wherein said recombinant orthopoxvirus genome comprises
   [1134] (i) a deletion of each of the C2L, C1L, N1L, N2L, M1L, M2L, K1L, K2L, K3L, K4L, K5L, K6L, K7R, F1L, F2L, F3L, B14R, B15R, B16R, B17L, B18R, B19R, B20R, and B8R genes; and
   [1135] (ii) a deletion in each copy of the following ITRs: B21R-ITR, B22R-ITR, B23R-ITR, B24R-ITR, B25R-ITR, B26R-ITR, B27R-ITR, B28R-ITR, and B29R-ITR.
[1136] 82. A nucleic acid comprising a recombinant orthopoxvirus genome, wherein said recombinant orthopoxvirus genome comprises
   [1137] (i) a deletion of each of the C2L, C1L, N1L, N2L, M1L, M2L, K1L, K2L, K3L, K4L, K5L, K6L, K7R, F1L, F2L, F3L, B14R, B15R, B16R, B17L, B18R, B19R, and B20R genes; and
   [1138] (ii) a deletion in each copy of the following ITRs: B21R-ITR, B22R-ITR, B23R-ITR, B24R-ITR, B25R-ITR, B26R-ITR, B27R-ITR, B28R-ITR, and B29R-ITR,
   [1139] wherein said recombinant orthopoxvirus genome comprises an intact B8R gene.
[1140] 83. The nucleic acid of any one of embodiments 1-82, further comprising at least one transgene selected from the group consisting of a transgene encoding an immune checkpoint inhibitor, a transgene encoding an interleukin (IL), and a transgene encoding a cytokine.
[1141] 84. The nucleic acid of embodiment 83, wherein the nucleic acid comprises at least two transgenes selected from the group consisting of a transgene encoding an immune checkpoint inhibitor, a transgene encoding an interleukin (IL), and a transgene encoding a cytokine.
[1142] 85. The nucleic acid of embodiment 84, wherein the nucleic acid comprises a transgene encoding an immune checkpoint inhibitor, a transgene encoding an interleukin (IL), and a transgene encoding a cytokine.
[1143] 86. The nucleic acid of any one of embodiment 83 or 84, wherein said nucleic acid comprises a transgene encoding an immune checkpoint inhibitor.
[1144] 87. The nucleic acid of embodiment 85 or 86, wherein said immune checkpoint inhibitor is selected from the group consisting of OX40 ligand, ICOS ligand, anti-CD47 antibody or antigen-binding fragment thereof, anti-CD40/CD40L antibody or antigen-binding fragment thereof, anti-Lag3 antibody or antigen-binding fragment thereof, anti-CTLA-4 antibody or antigen-binding fragment thereof, anti-PD-L1 antibody or antigen-binding fragment thereof, anti-PD1 antibody or antigen-binding fragment thereof, and anti-Tim-3 antibody or antigen-binding fragment thereof.
[1145] 88. The nucleic acid of embodiment 87, wherein said immune checkpoint inhibitor is an anti-PD-L1 antibody or antigen-binding fragment thereof or an anti-CTLA-4 antibody or antigen-binding fragment thereof.
[1146] 89. The nucleic acid of embodiment 88, wherein said immune checkpoint inhibitor is an anti-PD1 antibody or antigen-binding fragment thereof.
[1147] 90. The nucleic acid of embodiment 88, wherein said immune checkpoint inhibitor is an anti-CTLA-4 antibody or antigen-binding fragment thereof.
[1148] 91. The nucleic acid of embodiment 83 or 84, wherein said nucleic acid comprises a transgene encoding an interleukin (IL).
[1149] 92. The nucleic acid of embodiment 85 or 91, wherein said interleukin is selected from the group consisting of IL-1 alpha, IL-1 beta, IL-2, IL-4, IL-7, IL-10, IL-12 p35, IL-12 p40, IL-12 p70, IL-15, IL-18, IL-21, and IL-23.
[1150] 93. The nucleic acid of embodiment 92, wherein said interleukin is selected from the group consisting of IL-12 p35, IL-12 p40, and IL-12 p70.
[1151] 94. The nucleic acid of embodiment 93, wherein said interleukin is membrane-bound.
[1152] 95. The nucleic acid of embodiment 94, wherein said interleukin is membrane-bound IL-12 p70.
[1153] 96. The nucleic acid of embodiment 83 or 84, wherein said nucleic acid comprises a transgene encoding a cytokine.
[1154] 97. The nucleic acid of embodiment 96, wherein said cytokine is an interferon (IFN).
[1155] 98. The nucleic acid of embodiment 97, wherein said interferon is selected from the group consisting of IFN-alpha, IFN-beta, IFN-delta, IFN-epsilon, IFN-tau, IFN-omega, IFN-zeta, and IFN-gamma.
[1156] 99. The nucleic acid of embodiment 96, wherein said cytokine is a TNF superfamily member protein.
[1157] 100. The nucleic acid of embodiment 99, wherein said TNF superfamily member protein is selected from the group consisting of TRAIL, Fas ligand, LIGHT (TNFSF-14), TNF-alpha, and 4-1BB ligand.
[1158] 101. The nucleic acid of embodiment 96, wherein said cytokine is selected from the group consisting of GM-CSF, Flt3 ligand, CD40 ligand, TGF-beta, VEGF-R2, and c-kit.
[1159] 102. The nucleic acid of embodiment 101, wherein said cytokine is Flt3 ligand.
[1160] 103. The nucleic acid of embodiment 83-102, wherein said recombinant orthopoxvirus genome comprises a deletion in the B8R gene and at least one transgene is inserted into the deletion in the B8R gene. 0

[1161] 104. The nucleic acid of embodiment 103, wherein at least two transgenes are inserted into the deletion in the B8R gene.
[1162] 105. The nucleic acid of embodiment 104, wherein at least three transgenes are inserted into the deletion in the B8R gene.
[1163] 106. The nucleic acid of any one of embodiments 103-105, wherein at least one transgene is inserted in a locus that is not at the deletion in the B8R gene.
[1164] 107. The nucleic acid of embodiment 106, wherein the locus is at the boundary of a deletion at the 5′ end of the orthopoxvirus genome.
[1165] 108. The nucleic acid of embodiment 106, wherein the locus is at the boundary of a deletion at the 3′ end of the orthopoxvirus genome.
[1166] 109. A nucleic acid comprising a recombinant orthopoxvirus genome, wherein said recombinant orthopoxvirus genome comprises
   [1167] (i) a deletion of each of the C2L, C1L, N1L, N2L, M1L, M2L, K1L, K2L, K3L, K4L, K5L, K6L, K7R, F1L, F2L, F3L, B14R, B15R, B16R, B17L, B18R, B19R, B20R, and B8R genes;
   [1168] (ii) a deletion in each copy of the following ITRs: B21R-ITR, B22R-ITR, B23R-ITR, B24R-ITR, B25R-ITR, B26R-ITR, B27R-ITR, B28R-ITR, and B29R-ITR;
   [1169] (iii) an IL-12-TM transgene inserted into the deletion in the B8R gene;
   [1170] (iv) an Flt3 ligand transgene inserted into the deletion in the B8R gene; and
   [1171] (v) one of:
      [1172] (a) a transgene encoding a single chain anti-CTLA-4 antibody or antigen-binding fragment thereof
      [1173] or
      [1174] (b) (i) a transgene encoding a heavy chain of an anti-CTLA-4 antibody or antigen-binding fragment thereof, and
         [1175] (ii) a transgene encoding a light chain of an anti-CTLA-4 antibody or antigen-binding fragment thereof,
   [1176] wherein the transgene(s) in part (v) is/are inserted within the boundaries of a 5p deletion present in the recombinant orthopoxvirus genome, and
   [1177] wherein the anti-CTLA-4 antibody or antigen-binding fragment thereof is capable of binding CTLA-4.
[1178] 110. The nucleic acid of embodiment 109, wherein the orthopoxvirus genome is derived from a sequence of SEQ ID NO: 210, wherein
   [1179] (a) said derived sequence comprises a deletion of the B8R gene, and the IL-12-TM transgene, the Flt3 ligand transgene, and the transgene(s) encoding the single or double-chain anti-CTLA-4 antibody;
   [1180] (b) the IL-12-TM transgene encodes a protein comprising an amino acid sequence of is SEQ ID NO: 212;
   [1181] (c) the Flt3 ligand transgene encodes a protein comprising an amino acid sequence of SEQ ID NO: 213; and
   [1182] (d) the anti-CTLA-4 antibody comprises an amino acid sequence of SEQ ID NO: 211.
[1183] 111. A virus comprising the nucleic acid comprising the recombinant orthopoxvirus genome of any one of embodiments 1-110.
[1184] 112. The virus of embodiment 111, wherein
   [1185] a) said recombinant orthopoxvirus genome comprises a deletion of at least 2 genes selected from the group consisting of the C2L, C1L, N1L, N2L, M1L, M2L, K1L, K2L, K3L, K4L, K5L, K6L, K7R, F1L, F2L, F3L, B14R, B15R, B16R, B17L, B18R, B19R, and B20R genes;
   [1186] b) said recombinant orthopoxvirus genome comprises a deletion of at least 1 gene selected from the group consisting of the B14R, B15R, B16R, B17L, B18R, B19R, and B20R genes; or
   [1187] c) said recombinant orthopoxvirus genome comprises a deletion of at least 1 gene selected from the group consisting of the C2L, C1L, N1L, N2L, M1L, M2L, K1L, K2L, K3L, K4L, K5L, K6L, K7R, F1L, F2L, and F3L genes.
[1188] 113. The virus of embodiment 111 or 112, wherein said virus is derived from a vaccinia virus.
[1189] 114. The virus of embodiment 113, wherein said vaccinia virus is derived from a strain selected from the group consisting of Copenhagen, Western Reserve, Wyeth, Lister, EM63, ACAM2000, LC16m8, CV-1, modified vaccinia Ankara (MVA), Dairen I, GLV-1h68, IHD-J, L-IVP, LC16mO, Tashkent, Tian Tan, and WAU86/88-1.
[1190] 115. The virus of embodiment 114, wherein said vaccinia virus is derived from a strain selected from the group consisting of Copenhagen, Western Reserve, Tian Tan, Wyeth, and Lister.
[1191] 116. The virus of embodiment 115, wherein said vaccinia virus is derived from a Copenhagen strain vaccinia virus.
[1192] 117. The virus of any one of embodiments 111-116, wherein said recombinant orthopoxvirus genome further comprises a Thymidine Kinase (TK) gene.
[1193] 118. The virus of any one of embodiments 111-117, wherein said recombinant orthopoxvirus genome further comprises a ribonucleotide reductase gene.
[1194] 119. The virus of any one of embodiments 111-118, wherein upon contacting a population of mammalian cells with said virus, the population of mammalian cells exhibit increased syncytia formation relative to a population of mammalian cells of the same type contacted with a form of the virus that does not comprise said deletion.
[1195] 120. The virus of any one of embodiments 111-119, wherein upon contacting a population of mammalian cells with said virus, the population of mammalian cells exhibit increased spreading of the virus relative to a population of mammalian cells of the same type contacted with a form of the virus that does not comprise said deletion.
[1196] 121. The virus of any one of embodiments 111-120, wherein said virus exerts an increased cytotoxic effect on a population of mammalian cells relative to that of a form of the virus that does not comprise said deletion.
[1197] 122. The virus of any one of embodiments 119-121, wherein said mammalian cells are human cells.
[1198] 123. The virus of embodiment 122, wherein said human cells are cancer cells.
[1199] 124. The virus of any one of embodiments 119-121, wherein said mammalian cells are from a cell line selected from the group consisting of U2OS, 293, 293T, Vero, HeLa, A549, BHK, BSC40, CHO, OVCAR-8, 786-0, NCI-H23, U251, SF-295, T-47D, SKMEL2, BT-549, SK-MEL-28, MDA-MB-231, SK-OV-3, MCF7, M14, SF-268, CAKI-1, HPAV, OVCAR-4, HCT15, K-562, and HCT-116.
[1200] 125. The nucleic acid of any one of embodiments 1-110 or the virus of any one of embodiments 111-124, wherein said nucleic acid or said virus further comprises a transgene encoding a tumor-associated antigen.
[1201] 126. The nucleic acid or the virus of embodiment 125, wherein said tumor-associated antigen is a tumor-associated antigen listed in any one of Tables 3-30.
[1202] 127. The nucleic acid or the virus of embodiment 126, wherein said tumor-associated antigen is a tumor-associated antigen selected from the group consisting of CD19, CD33, EpCAM, CEA, PSMA, EGFRvIII, CD133, EGFR, CDH19, ENPP3, DLL3, MSLN, ROR1, HER2, HLAA2, EpHA2, EpHA3, MCSP, CSPG4, NG2, RON, FLT3, BCMA, CD20, FAPα, FRα, CA-9, PDGFRα, PDGFRβ, FSP1, S100A4, ADAM12m, RET, MET, FGFR, INSR, and NTRK.
[1203] 128. The nucleic acid or the virus of embodiment 125, wherein said tumor-associated antigen comprises MAGE-A3, or one or more fragments thereof.
[1204] 129. The nucleic acid or the virus of embodiment 125, wherein said tumor-associated antigen comprises NY-ESO-1, or one or more fragments thereof.
[1205] 130. The nucleic acid or the virus of embodiment 125, wherein said tumor-associated antigen comprises one or more human papillomavirus (HPV) proteins, or fragments thereof.
[1206] 131. The nucleic acid or the virus of embodiment 125, wherein said HPV proteins or fragments thereof comprise one or more of (i) E6 and E7 proteins, or fragments thereof, of HPV16 and (ii) E6 and E7 proteins, or fragments thereof, of HPV18.
[1207] 132. The nucleic acid or the virus of embodiment 131, wherein the sequences of said HPV proteins or fragments are disclosed in International Patent Publication WO/2014/127478, the contents of which are incorporated herein by reference.
[1208] 133. The nucleic acid or the virus of embodiment 125, wherein said tumor-associated antigen comprises brachyury or one or more fragments thereof.
[1209] 134. The nucleic acid or the virus of embodiment 125, wherein said tumor-associated antigen comprises prostatic acid phosphatase, or one or more fragments thereof.
[1210] 135. A packaging cell line comprising the nucleic acid of any one of embodiments 1-110 or the virus of any one of embodiments 111-124.
[1211] 136. A method of treating cancer in a mammalian patient, said method comprising administering a therapeutically effective amount of the virus of any one of embodiments 111-134 to said patient.
[1212] 137. The method of embodiment 136, wherein said mammalian patient is a human patient.
[1213] 138. The method of embodiment 136 or 137, wherein the virus is used as a prime in a prime:boost treatment.
[1214] 139. The method of embodiment 136 or 137, wherein the virus is used as a boost in a prime:boost treatment.

[1215] 140. The method of any one of embodiments 136-139, wherein said mammalian patient has cancer.
[1216] 141. The method of embodiment 140, wherein said cancer is selected from the group consisting of leukemia, lymphoma, liver cancer, bone cancer, lung cancer, brain cancer, bladder cancer, gastrointestinal cancer, breast cancer, cardiac cancer, cervical cancer, uterine cancer, head and neck cancer, gallbladder cancer, laryngeal cancer, lip and oral cavity cancer, ocular cancer, melanoma, pancreatic cancer, prostate cancer, colorectal cancer, testicular cancer, and throat cancer.
[1217] 142. The method of embodiment 140, wherein said cancer is selected from the group consisting of acute lymphoblastic leukemia (ALL), acute myeloid leukemia (AML), chronic lymphocytic leukemia (CLL), chronic myelogenous leukemia (CML), adrenocortical carcinoma, AIDS-related lymphoma, primary CNS lymphoma, anal cancer, appendix cancer, astrocytoma, atypical teratoid/rhabdoid tumor, basal cell carcinoma, bile duct cancer, extrahepatic cancer, Ewing sarcoma family, osteosarcoma and malignant fibrous histiocytoma, central nervous system embryonal tumors, central nervous system germ cell tumors, craniopharyngioma, ependymoma, bronchial tumors, Burkitt lymphoma, carcinoid tumor, primary lymphoma, chordoma, chronic myeloproliferative neoplasms, colon cancer, extrahepatic bile duct cancer, ductal carcinoma in situ (DCIS), endometrial cancer, ependymoma, esophageal cancer, esthesioneuroblastoma, extracranial germ cell tumor, extragonadal germ cell tumor, fallopian tube cancer, fibrous histiocytoma of bone, gastrointestinal carcinoid tumor, gastrointestinal stromal tumors (GIST), testicular germ cell tumor, gestational trophoblastic disease, glioma, childhood brain stem glioma, hairy cell leukemia, hepatocellular cancer, Langerhans cell histiocytosis, Hodgkin lymphoma, hypopharyngeal cancer, islet cell tumors, pancreatic neuroendocrine tumors, Wilms tumor and other childhood kidney tumors, Langerhans cell histiocytosis, small cell lung cancer, cutaneous T cell lymphoma, intraocular melanoma, Merkel cell carcinoma, mesothelioma, metastatic squamous neck cancer, midline tract carcinoma, multiple endocrine neoplasia syndromes, multiple myeloma/plasma cell neoplasm, myelodysplastic syndromes, nasal cavity and paranasal sinus cancer, nasopharyngeal cancer, neuroblastoma, non-Hodgkin's lymphoma (NHL), non-small cell lung cancer (NSCLC), epithelial ovarian cancer, germ cell ovarian cancer, low malignant potential ovarian cancer, pancreatic neuroendocrine tumors, papillomatosis, paraganglioma, paranasal sinus and nasal cavity cancer, parathyroid cancer, penile cancer, pharyngeal cancer, pheochromocytoma, pituitary tumor, pleuropulmonary blastoma, primary peritoneal cancer, rectal cancer, retinoblastoma, rhabdomyosarcoma, salivary gland cancer, Kaposi's sarcoma, rhabdomyosarcoma, Sézary syndrome, small intestine cancer, soft tissue sarcoma, throat cancer, thymoma and thymic carcinoma, thyroid cancer, transitional cell cancer of the renal pelvis and ureter, urethral cancer, endometrial uterine cancer, uterine sarcoma, vaginal cancer, vulvar cancer, and Waldenstrom macroglobulinemia. 0

[1218] 143. The method of any one of embodiments 136-142, wherein said method further comprises administering to said patient an immune checkpoint inhibitor.
[1219] 144. The method of embodiment 143, wherein said immune checkpoint inhibitor is selected from the group consisting of OX40 ligand, ICOS ligand, anti-CD47 antibody or antigen-binding fragment thereof, anti-CD40/CD40L antibody or antigen-binding fragment thereof, anti-Lag3 antibody or antigen-binding fragment thereof, anti-CTLA-4 antibody or antigen-binding fragment thereof, anti-PD-L1 antibody or antigen-binding fragment thereof, anti-PD1 antibody or antigen-binding fragment thereof, and anti-Tim-3 antibody or antigen-binding fragment thereof.
[1220] 145. The method of embodiment 144, wherein said immune checkpoint inhibitor is an anti-PD1 antibody or antigen-binding fragment thereof or an anti-CTLA-4 antibody or antigen-binding fragment thereof.
[1221] 146. The method of embodiment 145, wherein said immune checkpoint inhibitor is an anti-PD1 antibody or antigen-binding fragment thereof.
[1222] 147. The method of embodiment 145, wherein said immune checkpoint inhibitor is an anti-CTLA-4 antibody or antigen-binding fragment thereof.
[1223] 148. The method of any one of embodiments 136-147, wherein said method further comprises administering to said patient an interleukin.
[1224] 149. The method of embodiment 148, wherein said interleukin is selected from the group consisting of IL-1 alpha, IL-1 beta, IL-2, IL-4, IL-7, IL-10, IL-12 p35, IL-12 p40, IL-12 p70, IL-15, IL-18, IL-21, and IL-23.
[1225] 150. The method of embodiment 149, wherein said interleukin is selected from the group consisting of IL-12 p35, IL-12 p40, and IL-12 p70.
[1226] 151. The method of embodiment 149 or 150, wherein said interleukin is membrane-bound.
[1227] 152. The method of any one of embodiments 136-151, wherein said method further comprises administering to said patient an interferon.
[1228] 153. The method of embodiment 152, wherein said interferon is selected from the group consisting of
[1229] IFN-alpha, IFN-beta, IFN-delta, IFN-epsilon, IFN-tau, IFN-omega, IFN-zeta, and IFN-gamma.
[1230] 154. The method of any one of embodiments 136-153, wherein said method further comprises administering to said patient a cytokine.
[1231] 155. The method of embodiment 154, wherein said cytokine is a TNF superfamily member protein.
[1232] 156. The method of embodiment 155, wherein said TNF superfamily member protein is selected from the group consisting of TRAIL, Fas ligand, LIGHT (TNFSF-14), TNF-alpha, and 4-1BB ligand.
[1233] 157. The method of embodiment 154, wherein said cytokine is selected from the group consisting of GM-CSF, Flt3 ligand, CD40 ligand, TGF-beta, VEGF-R2, and cKit.
[1234] 158. The method of embodiment 157, wherein said cytokine is Flt3 ligand.
[1235] 159. A kit comprising the nucleic acid of any one of embodiments 1-110 or the virus of any one of embodiments 111-134 and a package insert instructing a user of said kit to express said nucleic acid or said virus in a host cell.
[1236] 160. A kit comprising the virus of any one of embodiments 111-134 and a package insert instructing a user to administer a therapeutically effective amount of said virus to a mammalian patient having cancer, thereby treating said cancer.
[1237] 161. The kit of embodiment 160, wherein said mammalian patient is a human patient.
[1238] 162. The nucleic acid of embodiment 94, wherein said interleukin is membrane-bound IL-12 p35.

### 5.7.3. Set 3

[1239] 1. A nucleic acid comprising a recombinant orthopoxvirus genome, wherein said recombinant orthopoxvirus genome comprises a deletion of at least 2 genes selected from the group consisting of the C2L, C1L, N1L, N2L, M1L, M2L, K1L, K2L, K3L, K4L, K5L, K6L, K7R, F1L, F2L, F3L, B14R, B15R, B16R, B17L, B18R, B19R, and B20R genes.
[1240] 2. The nucleic acid of embodiment 1, wherein said recombinant orthopoxvirus genome comprises a deletion of at least 3 genes, each gene selected from the group consisting of the C2L, C1L, N1L, N2L, M1L, M2L, K1L, K2L, K3L, K4L, K5L, K6L, K7R, F1L, F2L, F3L, B14R, B15R, B16R, B17L, B18R, B19R, and B20R genes.
[1241] 3. The nucleic acid of embodiment 2, wherein said recombinant orthopoxvirus genome comprises a deletion of at least 4 genes, each gene selected from the group consisting of the C2L, C1L, N1L, N2L, M1L, M2L, K1L, K2L, K3L, K4L, K5L, K6L, K7R, F1L, F2L, F3L, B14R, B15R, B16R, B17L, B18R, B19R, and B20R genes.
[1242] 4. The nucleic acid of embodiment 3, wherein said recombinant orthopoxvirus genome comprises a deletion of at least 5 genes, each gene selected from the group consisting of the C2L, C1L, N1L, N2L, M1L, M2L, K1L, K2L, K3L, K4L, K5L, K6L, K7R, F1L, F2L, F3L, B14R, B15R, B16R, B17L, B18R, B19R, and B20R genes.
[1243] 5. The nucleic acid of embodiment 4, wherein said recombinant orthopoxvirus genome comprises a deletion of at least 6 genes, each gene selected from the group consisting of the C2L, C1L, N1L, N2L, M1L, M2L, K1L, K2L, K3L, K4L, K5L, K6L, K7R, F1L, F2L, F3L, B14R, B15R, B16R, B17L, B18R, B19R, and B20R genes.
[1244] 6. The nucleic acid of embodiment 5, wherein said recombinant orthopoxvirus genome comprises a deletion of at least 7 genes, each gene selected from the group consisting of the C2L, C1L, N1L, N2L, M1L, M2L, K1L, K2L, K3L, K4L, K5L, K6L, K7R, F1L, F2L, F3L, B14R, B15R, B16R, B17L, B18R, B19R, and B20R genes.
[1245] 7. The nucleic acid of embodiment 6, wherein said recombinant orthopoxvirus genome comprises a deletion of at least 8 genes, each gene selected from the group consisting of the C2L, C1L, N1L, N2L, M1L, M2L, K1L, K2L, K3L, K4L, K5L, K6L, K7R, F1L, F2L, F3L, B14R, B15R, B16R, B17L, B18R, B19R, and B20R genes.
[1246] 8. The nucleic acid of embodiment 7, wherein said recombinant orthopoxvirus genome comprises a deletion of at least 9 genes, each gene selected from the group consisting of the C2L, C1L, N1L, N2L, M1L, M2L, K1L, K2L, K3L, K4L, K5L, K6L, K7R, F1L, F2L, F3L, B14R, B15R, B16R, B17L, B18R, B19R, and B20R genes.
[1247] 9. The nucleic acid of embodiment 8, wherein said recombinant orthopoxvirus genome comprises a deletion of at least 10 genes, each gene selected from the group consisting of the C2L, C1L, N1L, N2L, M1L, M2L, K1L, K2L, K3L, K4L, K5L, K6L, K7R, F1L, F2L, F3L, B14R, B15R, B16R, B17L, B18R, B19R, and B20R genes. 0

[1248] 10. The nucleic acid of embodiment 9, wherein said recombinant orthopoxvirus genome comprises a deletion of at least 11 genes, each gene selected from the group consisting of the C2L, C1L, N1L, N2L, M1L, M2L, K1L, K2L, K3L, K4L, K5L, K6L, K7R, F1L, F2L, F3L, B14R, B15R, B16R, B17L, B18R, B19R, and B20R genes.
[1249] 11. The nucleic acid of embodiment 10, wherein said recombinant orthopoxvirus genome comprises a deletion of at least 12 genes, each gene selected from the group consisting of the C2L, C1L, N1L, N2L, M1L, M2L, K1L, K2L, K3L, K4L, K5L, K6L, K7R, F1L, F2L, F3L, B14R, B15R, B16R, B17L, B18R, B19R, and B20R genes.
[1250] 12. The nucleic acid of embodiment 11, wherein said recombinant orthopoxvirus genome comprises a deletion of at least 13 genes, each gene selected from the group consisting of the C2L, C1L, N1L, N2L, M1L, M2L, K1L, K2L, K3L, K4L, K5L, K6L, K7R, F1L, F2L, F3L, B14R, B15R, B16R, B17L, B18R, B19R, and B20R genes.
[1251] 13. The nucleic acid of embodiment 12, wherein said recombinant orthopoxvirus genome comprises a deletion of at least 14 genes, each gene selected from the group consisting of the C2L, C1L, N1L, N2L, M1L, M2L, K1L, K2L, K3L, K4L, K5L, K6L, K7R, F1L, F2L, F3L, B14R, B15R, B16R, B17L, B18R, B19R, and B20R genes.
[1252] 14. The nucleic acid of embodiment 13, wherein said recombinant orthopoxvirus genome comprises a deletion of at least 15 genes, each gene selected from the group consisting of the C2L, C1L, N1L, N2L, M1L, M2L, K1L, K2L, K3L, K4L, K5L, K6L, K7R, F1L, F2L, F3L, B14R, B15R, B16R, B17L, B18R, B19R, and B20R genes.
[1253] 15. The nucleic acid of embodiment 14, wherein said recombinant orthopoxvirus genome comprises a deletion of at least 16 genes, each gene selected from the group consisting of the C2L, C1L, N1L, N2L, M1L, M2L, K1L, K2L, K3L, K4L, K5L, K6L, K7R, F1L, F2L, F3L, B14R, B15R, B16R, B17L, B18R, B19R, and B20R genes.
[1254] 16. The nucleic acid of embodiment 15, wherein said recombinant orthopoxvirus genome comprises a deletion of at least 17 genes, each gene selected from the group consisting of the C2L, C1L, N1L, N2L, M1L, M2L, K1L, K2L, K3L, K4L, K5L, K6L, K7R, F1L, F2L, F3L, B14R, B15R, B16R, B17L, B18R, B19R, and B20R genes.
[1255] 17. The nucleic acid of embodiment 16, wherein said recombinant orthopoxvirus genome comprises a deletion of at least 18 genes, each gene selected from the group consisting of the C2L, C1L, N1L, N2L, M1L, M2L, K1L, K2L, K3L, K4L, K5L, K6L, K7R, F1L, F2L, F3L, B14R, B15R, B16R, B17L, B18R, B19R, and B20R genes.
[1256] 18. The nucleic acid of embodiment 17, wherein said recombinant orthopoxvirus genome comprises a deletion of at least 19 genes, each gene selected from the group consisting of the C2L, C1L, N1L, N2L, M1L, M2L, K1L, K2L, K3L, K4L, K5L, K6L, K7R, F1L, F2L, F3L, B14R, B15R, B16R, B17L, B18R, B19R, and B20R genes.
[1257] 19. The nucleic acid of embodiment 18, wherein said recombinant orthopoxvirus genome comprises a deletion of at least 20 genes, each gene selected from the group consisting of the C2L, C1L, N1L, N2L, M1L, M2L, K1L, K2L, K3L, K4L, K5L, K6L, K7R, F1L, F2L, F3L, B14R, B15R, B16R, B17L, B18R, B19R, and B20R genes.
[1258] 20. The nucleic acid of embodiment 19, wherein said recombinant orthopoxvirus genome comprises a deletion of at least 21 genes, each gene selected from the group consisting of the C2L, C1L, N1L, N2L, M1L, M2L, K1L, K2L, K3L, K4L, K5L, K6L, K7R, F1L, F2L, F3L, B14R, B15R, B16R, B17L, B18R, B19R, and B20R genes.
[1259] 21. The nucleic acid of embodiment 20, wherein said recombinant orthopoxvirus genome comprises a deletion of at least 22 genes, each gene selected from the group consisting of the C2L, C1L, N1L, N2L, M1L, M2L, K1L, K2L, K3L, K4L, K5L, K6L, K7R, F1L, F2L, F3L, B14R, B15R, B16R, B17L, B18R, B19R, and B20R genes.
[1260] 22. The nucleic acid of embodiment 21, wherein said recombinant orthopoxvirus genome comprises a deletion of each of the C2L, C1L, N1L, N2L, M1L, M2L, K1L, K2L, K3L, K4L, K5L, K6L, K7R, F1L, F2L, F3L, B14R, B15R, B16R, B17L, B18R, B19R, and B20R genes.
[1261] 23. A nucleic acid comprising a recombinant orthopoxvirus genome, wherein said recombinant orthopoxvirus genome comprises a deletion of at least 1 gene selected from the group consisting of the B14R, B15R, B16R, B17L, B18R, B19R, and B20R genes.
[1262] 24. The nucleic acid of embodiment 23, wherein said recombinant orthopoxvirus genome comprises a deletion of at least 2 genes, each gene selected from the group consisting of the B14R, B15R, B16R, B17L, B18R, B19R, and B20R genes.
[1263] 25. The nucleic acid of embodiment 24, wherein said recombinant orthopoxvirus genome comprises a deletion of at least 3 genes, each gene selected from the group consisting of the B14R, B15R, B16R, B17L, B18R, B19R, and B20R genes.
[1264] 26. The nucleic acid of embodiment 25, wherein said recombinant orthopoxvirus genome comprises a deletion of at least 4 genes, each gene selected from the group consisting of the B14R, B15R, B16R, B17L, B18R, B19R, and B20R genes.
[1265] 27. The nucleic acid of embodiment 26, wherein said recombinant orthopoxvirus genome comprises a deletion of at least 5 genes, each gene selected from the group consisting of the B14R, B15R, B16R, B17L, B18R, B19R, and B20R genes.
[1266] 28. The nucleic acid of embodiment 27, wherein said recombinant orthopoxvirus genome comprises a deletion of at least 6 genes, each gene selected from the group consisting of the B14R, B15R, B16R, B17L, B18R, B19R, and B20R genes.
[1267] 29. The nucleic acid of embodiment 28, wherein said recombinant orthopoxvirus genome comprises a deletion of each of the B14R, B15R, B16R, B17L, B18R, B19R, and B20R genes.
[1268] 30. A nucleic acid comprising a recombinant orthopoxvirus genome, wherein said recombinant orthopoxvirus genome comprises a deletion of at least 1 gene selected from the group consisting of the C2L, C1L, N1L, N2L, M1L, M2L, K1L, K2L, K3L, K4L, K5L, K6L, K7R, F1L, F2L, and F3L genes.
[1269] 31. The nucleic acid of embodiment 30, wherein said recombinant orthopoxvirus genome comprises a deletion of at least 2 genes, each gene selected from the group consisting of the C2L, C1L, N1L, N2L, M1L, M2L, K1L, K2L, K3L, K4L, K5L, K6L, K7R, F1L, F2L, and F3L genes.
[1270] 32. The nucleic acid of embodiment 31, wherein said recombinant orthopoxvirus genome comprises a deletion of at least 3 genes, each gene selected from the group consisting of the C2L, C1L, N1L, N2L, M1L, M2L, K1L, K2L, K3L, K4L, K5L, K6L, K7R, F1L, F2L, and F3L genes.
[1271] 33. The nucleic acid of embodiment 32, wherein said recombinant orthopoxvirus genome comprises a deletion of at least 4 genes, each gene selected from the group consisting of the C2L, C1L, N1L, N2L, M1L, M2L, K1L, K2L, K3L, K4L, K5L, K6L, K7R, F1L, F2L, and F3L genes.
[1272] 34. The nucleic acid of embodiment 33, wherein said recombinant orthopoxvirus genome comprises a deletion of at least 5 genes, each gene selected from the group consisting of the C2L, C1L, N1L, N2L, M1L, M2L, K1L, K2L, K3L, K4L, K5L, K6L, K7R, F1L, F2L, and F3L genes.
[1273] 35. The nucleic acid of embodiment 34, wherein said recombinant orthopoxvirus genome comprises a deletion of at least 6 genes, each gene selected from the group consisting of the C2L, C1L, N1L, N2L, M1L, M2L, K1L, K2L, K3L, K4L, K5L, K6L, K7R, F1L, F2L, and F3L genes.
[1274] 36. The nucleic acid of embodiment 35, wherein said recombinant orthopoxvirus genome comprises a deletion of at least 7 genes, each gene selected from the group consisting of the C2L, C1L, N1L, N2L, M1L, M2L, K1L, K2L, K3L, K4L, K5L, K6L, K7R, F1L, F2L, and F3L genes.
[1275] 37. The nucleic acid of embodiment 36, wherein said recombinant orthopoxvirus genome comprises a deletion of at least 8 genes, each gene selected from the group consisting of the C2L, C1L, N1L, N2L, M1L, M2L, K1L, K2L, K3L, K4L, K5L, K6L, K7R, F1L, F2L, and F3L genes.
[1276] 38. The nucleic acid of embodiment 37, wherein said recombinant orthopoxvirus genome comprises a deletion of at least 9 genes, each gene selected from the group consisting of the C2L, C1L, N1L, N2L, M1L, M2L, K1L, K2L, K3L, K4L, K5L, K6L, K7R, F1L, F2L, and F3L genes.
[1277] 39. The nucleic acid of embodiment 38, wherein said recombinant orthopoxvirus genome comprises a deletion of at least 10 genes, each gene selected from the group consisting of the C2L, C1L, N1L, N2L, M1L, M2L, K1L, K2L, K3L, K4L, K5L, K6L, K7R, F1L, F2L, and F3L genes.
[1278] 40. The nucleic acid of embodiment 39, wherein said recombinant orthopoxvirus genome comprises a deletion of at least 11 genes, each gene selected from the group consisting of the C2L, C1L, N1L, N2L, M1L, M2L, K1L, K2L, K3L, K4L, K5L, K6L, K7R, F1L, F2L, and F3L genes.
[1279] 41. The nucleic acid of embodiment 40, wherein said recombinant orthopoxvirus genome comprises a deletion of at least 12 genes, each gene selected from the group consisting of the C2L, C1L, N1L, N2L, M1L, M2L, K1L, K2L, K3L, K4L, K5L, K6L, K7R, F1L, F2L, and F3L genes.
[1280] 42. The nucleic acid of embodiment 41, wherein said recombinant orthopoxvirus genome comprises a deletion of at least 13 genes, each gene selected from the group consisting of the C2L, C1L, N1L, N2L, M1L, M2L, K1L, K2L, K3L, K4L, K5L, K6L, K7R, F1L, F2L, and F3L genes.
[1281] 43. The nucleic acid of embodiment 42, wherein said recombinant orthopoxvirus genome comprises a deletion of at least 14 genes, each gene selected from the group consisting of the C2L, C1L, N1L, N2L, M1L, M2L, K1L, K2L, K3L, K4L, K5L, K6L, K7R, F1L, F2L, and F3L genes.
[1282] 44. The nucleic acid of embodiment 43, wherein said recombinant orthopoxvirus genome comprises a deletion of at least 15 genes, each gene selected from the group consisting of the C2L, C1L, N1L, N2L, M1L, M2L, K1L, K2L, K3L, K4L, K5L, K6L, K7R, F1L, F2L, and F3L genes.
[1283] 45. The nucleic acid of embodiment 44, wherein said recombinant orthopoxvirus genome comprises a deletion of each of the C2L, C1L, N1L, N2L, M1L, M2L, K1L, K2L, K3L, K4L, K5L, K6L, K7R, F1L, F2L, and F3L genes.
[1284] 46. The nucleic acid comprising a recombinant orthopoxvirus genome of any one of embodiments 1-45, wherein said recombinant orthopoxvirus genome comprises a deletion of at least 1 gene that encodes a protein involved in host interaction.
[1285] 47. The nucleic acid of embodiment 46, wherein said protein affects calcium-independent adhesion to the extracellular matrix.
[1286] 48. The nucleic acid of embodiment 46, wherein said protein is an NF-κB inhibitor.
[1287] 49. The nucleic acid of embodiment 48, wherein said protein is encoded by a gene selected from the group consisting of the C2L, N1L, M2L, K1L, and K7R genes.
[1288] 50. The nucleic acid of embodiment 46, wherein said protein is an apoptosis inhibitor.
[1289] 51. The nucleic acid of embodiment 47, wherein said apoptosis inhibitor is a caspase-9 inhibitor.
[1290] 52. The nucleic acid of embodiment 51, wherein said caspase-9 inhibitor is encoded by the F1L gene.
[1291] 53. The nucleic acid of embodiment 50, wherein said apoptosis inhibitor is a BCL-2-like protein.
[1292] 54. The nucleic acid of embodiment 53, wherein said BCL-2-like protein is encoded by N1L.
[1293] 55. The nucleic acid of embodiment 46, wherein said protein is an interferon regulatory factor 3 (IRF3) inhibitor.
[1294] 56. The nucleic acid of embodiment 55, wherein said IRF3 inhibitor is encoded by N2L or K7R.
[1295] 57. The nucleic acid of embodiment 46, wherein said protein is a serine protease inhibitor.
[1296] 58. The nucleic acid of embodiment 46, wherein said protein prevents cell fusion.
[1297] 59. The nucleic acid of embodiment 58, wherein said protein is encoded by K2L.
[1298] 60. The nucleic acid of embodiment 46, wherein said protein is an RNA-activated protein kinase (PKR) inhibitor.
[1299] 61. The nucleic acid of embodiment 60, wherein said protein is encoded by K1L or K3L.
[1300] 62. The nucleic acid of embodiment 46, wherein said protein is a virulence factor.
[1301] 63. The nucleic acid of embodiment 63, wherein said protein is encoded by F3L.
[1302] 64. The nucleic acid of embodiment 46, wherein said protein is an IL-1-beta inhibitor.
[1303] 65. The nucleic acid of embodiment 64, wherein said protein is encoded by B16R.
[1304] 66. The nucleic acid of embodiment 46, wherein said protein is a secreted IFNα sequestor.
[1305] 67. The nucleic acid of embodiment 67, wherein said protein is encoded by B19R.
[1306] 68. The nucleic acid comprising a recombinant orthopoxvirus genome of any one of embodiments 1-67, wherein said recombinant orthopoxvirus genome comprises a deletion of at least 1 gene encoding a protein involved in DNA replication.
[1307] 69. The nucleic acid of embodiment 68, wherein said protein is a DNA modifying nuclease.
[1308] 70. The nucleic acid of embodiment 69, wherein said protein is encoded by K4L.
[1309] 71. The nucleic acid of embodiment 70, wherein said protein is a deoxyuridine triphosphatase (dUTPase).
[1310] 72. The nucleic acid of embodiment 71, wherein the dUTPase is encoded by F2L.
[1311] 73. The nucleic acid of any one of embodiments 1-72, wherein at least one deleted gene's entire nucleotide sequence is deleted.
[1312] 74. The nucleic acid of any one of embodiments 1-72, wherein at least one deleted gene is only partially deleted, and wherein the partial deletion is sufficient to render said partially deleted gene nonfunctional upon introduction into a host cell.
[1313] 75. The nucleic acid of any one of embodiments 1-74, wherein said recombinant orthopoxvirus genome comprises at least two copies of inverted terminal repeats (ITRs).
[1314] 76. The nucleic acid of any one of embodiments 1-74, wherein said recombinant orthopoxvirus genome lacks any copies of ITRs.
[1315] 77. The nucleic acid of any one of embodiments 1-74, wherein said recombinant orthopoxvirus genome comprises a deletion in at least one copy of an ITR selected from the group consisting of B21R-ITR, B22R-ITR, B23R-ITR, B24R-ITR, B25R-ITR, B26R-ITR, B27R-ITR, B28R-ITR, and B29R-ITR.
[1316] 78. The nucleic acid of any one of embodiments 1-74, wherein said recombinant orthopoxvirus genome comprises a deletion in at least all of the following copies of ITRs: B21R-ITR, B22R-ITR, B23R-ITR, B24R-ITR, B25R-ITR, B26R-ITR, B27R-ITR, B28R-ITR, and B29R-ITR.
[1317] 79. The nucleic acid of any one of embodiments 1-78, wherein said recombinant orthopoxvirus genome comprises a deletion in the B8R gene.
[1318] 80. The nucleic acid of any one of embodiments 1-78, wherein said recombinant orthopoxvirus genome comprises an intact B8R gene.
[1319] 81. A nucleic acid comprising a recombinant orthopoxvirus genome, wherein said recombinant orthopoxvirus genome comprises
   [1320] (i) a deletion of each of the C2L, C1L, N1L, N2L, M1L, M2L, K1L, K2L, K3L, K4L, K5L, K6L, K7R, F1L, F2L, F3L, B14R, B15R, B16R, B17L, B18R, B19R, B20R, and B8R genes; and
   [1321] (ii) a deletion in each copy of the following ITRs: B21R-ITR, B22R-ITR, B23R-ITR, B24R-ITR, B25R-ITR, B26R-ITR, B27R-ITR, B28R-ITR, and B29R-ITR.
[1322] 82. A nucleic acid comprising a recombinant orthopoxvirus genome, wherein said recombinant orthopoxvirus genome comprises
   [1323] (i) a deletion of each of the C2L, C1L, N1L, N2L, M1L, M2L, K1L, K2L, K3L, K4L, K5L, K6L, K7R, F1L, F2L, F3L, B14R, B15R, B16R, B17L, B18R, B19R, and B20R genes; and
   [1324] (ii) a deletion in each copy of the following ITRs: B21R-ITR, B22R-ITR, B23R-ITR, B24R-ITR, B25R-ITR, B26R-ITR, B27R-ITR, B28R-ITR, and B29R-ITR,
   [1325] wherein said recombinant orthopoxvirus genome comprises an intact B8R gene.
[1326] 83. The nucleic acid of any one of embodiments 1-82, further comprising at least one transgene selected from the group consisting of a transgene encoding an immune checkpoint inhibitor, a transgene encoding an interleukin (IL), and a transgene encoding a cytokine.
[1327] 84. The nucleic acid of embodiment 83, wherein the nucleic acid comprises at least two transgenes selected from the group consisting of a transgene encoding an immune checkpoint inhibitor, a transgene encoding an interleukin (IL), and a transgene encoding a cytokine.
[1328] 85. The nucleic acid of embodiment 84, wherein the nucleic acid comprises a transgene encoding an immune checkpoint inhibitor, a transgene encoding an interleukin (IL), and a transgene encoding a cytokine.
[1329] 86. The nucleic acid of any one of embodiment 83 or 84, wherein said nucleic acid comprises a transgene encoding an immune checkpoint inhibitor.
[1330] 87. The nucleic acid of embodiment 85 or 86, wherein said immune checkpoint inhibitor is selected from the group consisting of OX40 ligand, ICOS ligand, anti-CD47 antibody or antigen-binding fragment thereof, anti-CD40/CD40L antibody or antigen-binding fragment thereof, anti-Lag3 antibody or antigen-binding fragment thereof, anti-CTLA-4 antibody or antigen-binding fragment thereof, anti-PD-L1 antibody or antigen-binding fragment thereof, anti-PD1 antibody or antigen-binding fragment thereof, and anti-Tim-3 antibody or antigen-binding fragment thereof.
[1331] 88. The nucleic acid of embodiment 87, wherein said immune checkpoint inhibitor is an anti-PD-L1 antibody or antigen-binding fragment thereof or an anti-CTLA-4 antibody or antigen-binding fragment thereof.
[1332] 89. The nucleic acid of embodiment 88, wherein said immune checkpoint inhibitor is an anti-PD1 antibody or antigen-binding fragment thereof.
[1333] 90. The nucleic acid of embodiment 88, wherein said immune checkpoint inhibitor is an anti-CTLA-4 antibody or antigen-binding fragment thereof.
[1334] 91. The nucleic acid of embodiment 83 or 84, wherein said nucleic acid comprises a transgene encoding an interleukin (IL).
[1335] 92. The nucleic acid of embodiment 85 or 91, wherein said interleukin is selected from the group consisting of IL-1 alpha, IL-1 beta, IL-2, IL-4, IL-7, IL-10, IL-12 p35, IL-12 p40, IL-12 p70, IL-15, IL-18, IL-21, and IL-23.
[1336] 93. The nucleic acid of embodiment 92, wherein said interleukin is selected from the group consisting of IL-12 p35, IL-12 p40, and IL-12 p70.
[1337] 94. The nucleic acid of embodiment 93, wherein said interleukin is membrane-bound.
[1338] 95. The nucleic acid of embodiment 94, wherein said interleukin is membrane-bound IL-12 p70.
[1339] 96. The nucleic acid of embodiment 83 or 84, wherein said nucleic acid comprises a transgene encoding a cytokine.
[1340] 97. The nucleic acid of embodiment 96, wherein said cytokine is an interferon (IFN).
[1341] 98. The nucleic acid of embodiment 97, wherein said interferon is selected from the group consisting of IFN-alpha, IFN-beta, IFN-delta, IFN-epsilon, IFN-tau, IFN-omega, IFN-zeta, and IFN-gamma.
[1342] 99. The nucleic acid of embodiment 96, wherein said cytokine is a TNF superfamily member protein.
[1343] 100. The nucleic acid of embodiment 99, wherein said TNF superfamily member protein is selected from the group consisting of TRAIL, Fas ligand, LIGHT (TNFSF-14), TNF-alpha, and 4-1BB ligand.
[1344] 101. The nucleic acid of embodiment 96, wherein said cytokine is selected from the group consisting of GM-CSF, Flt3 ligand, CD40 ligand, TGF-beta, VEGF-R2, and c-kit.
[1345] 102. The nucleic acid of embodiment 101, wherein said cytokine is Flt3 ligand.
[1346] 103. The nucleic acid of embodiment 83-102, wherein said recombinant orthopoxvirus genome comprises a deletion in the B8R gene and at least one transgene is inserted into the deletion in the B8R gene.
[1347] 104. The nucleic acid of embodiment 103, wherein at least two transgenes are inserted into the deletion in the B8R gene.
[1348] 105. The nucleic acid of embodiment 104, wherein at least three transgenes are inserted into the deletion in the B8R gene.
[1349] 106. The nucleic acid of any one of embodiments 103-105, wherein at least one transgene is inserted in a locus that is not at the deletion in the B8R gene.
[1350] 107. The nucleic acid of embodiment 106, wherein the locus is at the boundary of a deletion at the 5′ end of the orthopoxvirus genome.
[1351] 108. The nucleic acid of embodiment 106, wherein the locus is at the boundary of a deletion at the 3′ end of the orthopoxvirus genome.
[1352] 109. A nucleic acid comprising a recombinant orthopoxvirus genome, wherein said recombinant orthopoxvirus genome comprises
   [1353] (i) a deletion of each of the C2L, C1L, N1L, N2L, M1L, M2L, K1L, K2L, K3L, K4L, K5L, K6L, K7R, F1L, F2L, F3L, B14R, B15R, B16R, B17L, B18R, B19R, B20R, and B8R genes;
   [1354] (ii) a deletion in each copy of the following ITRs: B21R-ITR, B22R-ITR, B23R-ITR, B24R-ITR, B25R-ITR, B26R-ITR, B27R-ITR, B28R-ITR, and B29R-ITR;
   [1355] (iii) an IL-12-TM transgene inserted into the deletion in the B8R gene;
   [1356] (iv) an Flt3 ligand transgene inserted into the deletion in the B8R gene; and
   [1357] (v) one of:
      [1358] (a) a transgene encoding a single chain anti-CTLA-4 antibody or antigen-binding fragment thereof
      [1359] or
      [1360] (b) (i) a transgene encoding a heavy chain of an anti-CTLA-4 antibody or antigen-binding fragment thereof, and
         [1361] (ii) a transgene encoding a light chain of an anti-CTLA-4 antibody or antigen-binding fragment thereof,
   [1362] wherein the transgene(s) in part (v) is/are inserted within the boundaries of a 5p deletion present in the recombinant orthopoxvirus genome, and
   [1363] wherein the anti-CTLA-4 antibody or antigen-binding fragment thereof is capable of binding CTLA-4.
[1364] 110. The nucleic acid of embodiment 109, wherein the orthopoxvirus genome is derived from a sequence of SEQ ID NO: 210, wherein
   [1365] (a) said derived sequence comprises a deletion of the B8R gene, and the IL-12-TM transgene, the Flt3 ligand transgene, and the transgene(s) encoding the single or double-chain anti-CTLA-4 antibody;
   [1366] (b) the IL-12-TM transgene encodes a protein comprising an amino acid sequence of is SEQ ID NO: 212;
   [1367] (c) the Flt3 ligand transgene encodes a protein comprising an amino acid sequence of SEQ ID NO: 213; and
   [1368] (d) the anti-CTLA-4 antibody comprises an amino acid sequence of SEQ ID NO: 211.
[1369] 111. A virus comprising the nucleic acid comprising the recombinant orthopoxvirus genome of any one of embodiments 1-110.
[1370] 112. The virus of embodiment 111, wherein
   [1371] a) said recombinant orthopoxvirus genome comprises a deletion of at least 2 genes selected from the group consisting of the C2L, C1L, N1L, N2L, M1L, M2L, K1L, K2L, K3L, K4L, K5L, K6L, K7R, F1L, F2L, F3L, B14R, B15R, B16R, B17L, B18R, B19R, and B20R genes;
   [1372] b) said recombinant orthopoxvirus genome comprises a deletion of at least 1 gene selected from the group consisting of the B14R, B15R, B16R, B17L, B18R, B19R, and B20R genes; or
   [1373] c) said recombinant orthopoxvirus genome comprises a deletion of at least 1 gene selected from the group consisting of the C2L, C1L, N1L, N2L, M1L, M2L, K1L, K2L, K3L, K4L, K5L, K6L, K7R, F1L, F2L, and F3L genes.
[1374] 113. The virus of embodiment 111 or 112, wherein said virus is derived from a vaccinia virus.
[1375] 114. The virus of embodiment 113, wherein said vaccinia virus is derived from a strain selected from the group consisting of Copenhagen, Western Reserve, Wyeth, Lister, EM63, ACAM2000, LC16m8, CV-1, modified vaccinia Ankara (MVA), Dairen I, GLV-1h68, IHD-J, L-IVP, LC16mO, Tashkent, Tian Tan, and WAU86/88-1.
[1376] 115. The virus of embodiment 114, wherein said vaccinia virus is derived from a strain selected from the group consisting of Copenhagen, Western Reserve, Tian Tan, Wyeth, and Lister.
[1377] 116. The virus of embodiment 115, wherein said vaccinia virus is derived from a Copenhagen strain vaccinia virus.
[1378] 117. The virus of any one of embodiments 111-116, wherein said recombinant orthopoxvirus genome further comprises a Thymidine Kinase (TK) gene.
[1379] 118. The virus of any one of embodiments 111-117, wherein said recombinant orthopoxvirus genome further comprises a ribonucleotide reductase gene.
[1380] 119. The virus of any one of embodiments 111-118, wherein upon contacting a population of mammalian cells with said virus, the population of mammalian cells exhibit increased syncytia formation relative to a population of mammalian cells of the same type contacted with a form of the virus that does not comprise said deletion.
[1381] 120. The virus of any one of embodiments 111-119, wherein upon contacting a population of mammalian cells with said virus, the population of mammalian cells exhibit increased spreading of the virus relative to a population of mammalian cells of the same type contacted with a form of the virus that does not comprise said deletion.
[1382] 121. The virus of any one of embodiments 111-120, wherein said virus exerts an increased cytotoxic effect on a population of mammalian cells relative to that of a form of the virus that does not comprise said deletion.
[1383] 122. The virus of any one of embodiments 119-121, wherein said mammalian cells are human cells.
[1384] 123. The virus of embodiment 122, wherein said human cells are cancer cells.
[1385] 124. The virus of any one of embodiments 119-121, wherein said mammalian cells are from a cell line selected from the group consisting of U2OS, 293, 293T, Vero, HeLa, A549, BHK, BSC40, CHO, OVCAR-8, 786-0, NCI-H23, U251, SF-295, T-47D, SKMEL2, BT-549, SK-MEL-28, MDA-MB-231, SK-OV-3, MCF7, M14, SF-268, CAKI-1, HPAV, OVCAR-4, HCT15, K-562, and HCT-116.
[1386] 125. The nucleic acid of any one of embodiments 1-110 or the virus of any one of embodiments 111-124, wherein said nucleic acid or said virus further comprises a transgene encoding a tumor-associated antigen.
[1387] 126. The nucleic acid or the virus of embodiment 125, wherein said tumor-associated antigen is a tumor-associated antigen listed in any one of Tables 3-30.
[1388] 127. The nucleic acid or the virus of embodiment 126, wherein said tumor-associated antigen is a tumor-associated antigen selected from the group consisting of CD19, CD33, EpCAM, CEA, PSMA, EGFRvIII, CD133, EGFR, CDH19, ENPP3, DLL3, MSLN, ROR1, HER2, HLAA2, EpHA2, EpHA3, MCSP, CSPG4, NG2, RON, FLT3, BCMA, CD20, FAPα, FRα, CA-9, PDGFRα, PDGFRβ, FSP1, S100A4, ADAM12m, RET, MET, FGFR, INSR, and NTRK.
[1389] 128. The nucleic acid or the virus of embodiment 125, wherein said tumor-associated antigen comprises MAGE-A3, or one or more fragments thereof.
[1390] 129. The nucleic acid or the virus of embodiment 125, wherein said tumor-associated antigen comprises NY-ESO-1, or one or more fragments thereof.
[1391] 130. The nucleic acid or the virus of embodiment 125, wherein said tumor-associated antigen comprises one or more human papillomavirus (HPV) proteins, or fragments thereof.
[1392] 131. The nucleic acid or the virus of embodiment 125, wherein said HPV proteins or fragments thereof comprise one or more of (i) E6 and E7 proteins, or fragments thereof, of HPV16 and (ii) E6 and E7 proteins, or fragments thereof, of HPV18.
[1393] 132. The nucleic acid or the virus of embodiment 131, wherein the sequences of said HPV proteins or fragments are disclosed in International Patent Publication WO/2014/127478, the contents of which are incorporated herein by reference.
[1394] 133. The nucleic acid or the virus of embodiment 125, wherein said tumor-associated antigen comprises brachyury or one or more fragments thereof.
[1395] 134. The nucleic acid or the virus of embodiment 125, wherein said tumor-associated antigen comprises prostatic acid phosphatase, or one or more fragments thereof.
[1396] 135. A packaging cell line comprising the nucleic acid of any one of embodiments 1-110 or the virus of any one of embodiments 111-124.
[1397] 136. A method of treating cancer in a mammalian patient, said method comprising administering a therapeutically effective amount of the virus of any one of embodiments 111-134 to said patient.
[1398] 137. The method of embodiment 136, wherein said mammalian patient is a human patient.
[1399] 138. The method of embodiment 136 or 137, wherein the virus is used as a prime in a prime:boost treatment.
[1400] 139. The method of embodiment 136 or 137, wherein the virus is used as a boost in a prime:boost treatment.
[1401] 140. The method of any one of embodiments 136-139, wherein said mammalian patient has cancer.
[1402] 141. The method of embodiment 140, wherein said cancer is selected from the group consisting of leukemia, lymphoma, liver cancer, bone cancer, lung cancer, brain cancer, bladder cancer, gastrointestinal cancer, breast cancer, cardiac cancer, cervical cancer, uterine cancer, head and neck cancer, gallbladder cancer, laryngeal cancer, lip and oral cavity cancer, ocular cancer, melanoma, pancreatic cancer, prostate cancer, colorectal cancer, testicular cancer, and throat cancer.
[1403] 142. The method of embodiment 140, wherein said cancer is selected from the group consisting of acute lymphoblastic leukemia (ALL), acute myeloid leukemia (AML), chronic lymphocytic leukemia (CLL), chronic myelogenous leukemia (CML), adrenocortical carcinoma, AIDS-related lymphoma, primary CNS lymphoma, anal cancer, appendix cancer, astrocytoma, atypical teratoid/rhabdoid tumor, basal cell carcinoma, bile duct cancer, extrahepatic cancer, Ewing sarcoma family, osteosarcoma and malignant fibrous histiocytoma, central nervous system embryonal tumors, central nervous system germ cell tumors, craniopharyngioma, ependymoma, bronchial tumors, Burkitt lymphoma, carcinoid tumor, primary lymphoma, chordoma, chronic myeloproliferative neoplasms, colon cancer, extrahepatic bile duct cancer, ductal carcinoma in situ (DCIS), endometrial cancer, ependymoma, esophageal cancer, esthesioneuroblastoma, extracranial germ cell tumor, extragonadal germ cell tumor, fallopian tube cancer, fibrous histiocytoma of bone, gastrointestinal carcinoid tumor, gastrointestinal stromal tumors (GIST), testicular germ cell tumor, gestational trophoblastic disease, glioma, childhood brain stem glioma, hairy cell leukemia, hepatocellular cancer, Langerhans cell histiocytosis, Hodgkin lymphoma, hypopharyngeal cancer, islet cell tumors, pancreatic neuroendocrine tumors, Wilms tumor and other childhood kidney tumors, Langerhans cell histiocytosis, small cell lung cancer, cutaneous T cell lymphoma, intraocular melanoma, Merkel cell carcinoma, mesothelioma, metastatic squamous neck cancer, midline tract carcinoma, multiple endocrine neoplasia syndromes, multiple myeloma/plasma cell neoplasm, myelodysplastic syndromes, nasal cavity and paranasal sinus cancer, nasopharyngeal cancer, neuroblastoma, non-Hodgkin's lymphoma (NHL), non-small cell lung cancer (NSCLC), epithelial ovarian cancer, germ cell ovarian cancer, low malignant potential ovarian cancer, pancreatic neuroendocrine tumors, papillomatosis, paraganglioma, paranasal sinus and nasal cavity cancer, parathyroid cancer, penile cancer, pharyngeal cancer, pheochromocytoma, pituitary tumor, pleuropulmonary blastoma, primary peritoneal cancer, rectal cancer, retinoblastoma, rhabdomyosarcoma, salivary gland cancer, Kaposi's sarcoma, rhabdomyosarcoma, Sézary syndrome, small intestine cancer, soft tissue sarcoma, throat cancer, thymoma and thymic carcinoma, thyroid cancer, transitional cell cancer of the renal pelvis and ureter, urethral cancer, endometrial uterine cancer, uterine sarcoma, vaginal cancer, vulvar cancer, and Waldenstrom macroglobulinemia.
[1404] 143. The method of any one of embodiments 136-142, wherein said method further comprises administering to said patient an immune checkpoint inhibitor.
[1405] 144. The method of embodiment 143, wherein said immune checkpoint inhibitor is selected from the group consisting of OX40 ligand, ICOS ligand, anti-CD47 antibody or antigen-binding fragment thereof, anti-CD40/CD40L antibody or antigen-binding fragment thereof, anti-Lag3 antibody or antigen-binding fragment thereof, anti-CTLA-4 antibody or antigen-binding fragment thereof, anti-PD-L1 antibody or antigen-binding fragment thereof, anti-PD1 antibody or antigen-binding fragment thereof, and anti-Tim-3 antibody or antigen-binding fragment thereof.
[1406] 145. The method of embodiment 144, wherein said immune checkpoint inhibitor is an anti-PD1 antibody or antigen-binding fragment thereof or an anti-CTLA-4 antibody or antigen-binding fragment thereof.
[1407] 146. The method of embodiment 145, wherein said immune checkpoint inhibitor is an anti-PD1 antibody or antigen-binding fragment thereof.
[1408] 147. The method of embodiment 145, wherein said immune checkpoint inhibitor is an anti-CTLA-4 antibody or antigen-binding fragment thereof.
[1409] 148. The method of any one of embodiments 136-147, wherein said method further comprises administering to said patient an interleukin.
[1410] 149. The method of embodiment 148, wherein said interleukin is selected from the group consisting of IL-1 alpha, IL-1 beta, IL-2, IL-4, IL-7, IL-10, IL-12 p35, IL-12 p40, IL-12 p70, IL-15, IL-18, IL-21, and IL-23.
[1411] 150. The method of embodiment 149, wherein said interleukin is selected from the group consisting of IL-12 p35, IL-12 p40, and IL-12 p70.
[1412] 151. The method of embodiment 149 or 150, wherein said interleukin is membrane-bound.
[1413] 152. The method of any one of embodiments 136-151, wherein said method further comprises administering to said patient an interferon.
[1414] 153. The method of embodiment 152, wherein said interferon is selected from the group consisting of
[1415] IFN-alpha, IFN-beta, IFN-delta, IFN-epsilon, IFN-tau, IFN-omega, IFN-zeta, and IFN-gamma.
[1416] 154. The method of any one of embodiments 136-153, wherein said method further comprises administering to said patient a cytokine.
[1417] 155. The method of embodiment 154, wherein said cytokine is a TNF superfamily member protein.
[1418] 156. The method of embodiment 155, wherein said TNF superfamily member protein is selected from the group consisting of TRAIL, Fas ligand, LIGHT (TNFSF-14), TNF-alpha, and 4-1BB ligand.
[1419] 157. The method of embodiment 154, wherein said cytokine is selected from the group consisting of GM-CSF, Flt3 ligand, CD40 ligand, TGF-beta, VEGF-R2, and cKit.
[1420] 158. The method of embodiment 157, wherein said cytokine is Flt3 ligand.
[1421] 159. A kit comprising the nucleic acid of any one of embodiments 1-110 or the virus of any one of embodiments 111-134 and a package insert instructing a user of said kit to express said nucleic acid or said virus in a host cell. 0

[1422] 160. A kit comprising the virus of any one of embodiments 111-134 and a package insert instructing a user to administer a therapeutically effective amount of said virus to a mammalian patient having cancer, thereby treating said cancer.
[1423] 161. The kit of embodiment 160, wherein said mammalian patient is a human patient.
[1424] 162. The nucleic acid of embodiment 94, wherein said interleukin is membrane-bound IL-12 p35.

### 5.7.4. Set 4

[1425] 1. A nucleic acid comprising a recombinant vaccinia virus genome, comprising:
   [1426] (a) a vaccinia virus nucleotide sequence of SEQ ID NO: 210, which comprises partial C2L, F3L, B14R, and B29R vaccinia genes and which comprises a deletion in the B8R gene;
   [1427] (b) a first transgene comprising a first nucleotide sequence encoding an antibody that specifically binds to Cytotoxic T-lymphocyte Associated Protein 4 (CTLA-4), wherein the first nucleotide sequence is set forth in SEQ ID NO: 214;
   [1428] (c) a second transgene comprising a second nucleotide sequence encoding an Interleukin 12 (IL-12) polypeptide, wherein the second nucleotide sequence is set forth in SEQ ID NO: 215; and
   [1429] (d) a third transgene comprising a third nucleotide sequence encoding FMS-like tyrosine kinase 3 ligand (FLT3L), wherein the third nucleotide sequence is set forth in SEQ ID NO: 216.
[1430] 2. The nucleic acid of embodiment 1, wherein the first nucleotide sequence is in the same orientation as endogenous vaccinia virus genes that flank the first nucleotide sequence, the second nucleotide sequence is in the same orientation as endogenous vaccinia virus genes that flank the second nucleotide sequence, and the third nucleotide sequence is in the same orientation as endogenous vaccinia virus genes that flank the third nucleotide sequence.
[1431] 3. The nucleic acid of embodiment 1 or 2, further comprising a nucleotide sequence comprising at least one promoter operably linked to the first nucleotide sequence encoding the anti-CTLA-4 antibody.
[1432] 4. The nucleic acid of embodiment 3, wherein the at least one promoter operably linked to the first nucleotide sequence encoding the anti-CTLA-4 antibody is an H5R promoter, a pS promoter, or a LEO promoter.
[1433] 5. The nucleic acid of embodiment 3, wherein the at least one promoter operably linked to the first nucleotide sequence encoding the anti-CTLA-4 antibody is an H5R promoter.
[1434] 6. The nucleic acid of any one of embodiments 1-5, further comprising a nucleotide sequence comprising at least one promoter operably linked to the second nucleotide sequence encoding the IL-12 polypeptide.
[1435] 7. The nucleic acid of embodiment 6, wherein the at least one promoter operably linked to the second nucleotide sequence encoding the IL-12 polypeptide is a late promoter.
[1436] 8. The nucleic acid of embodiment 7, wherein the late promoter comprises the nucleotide sequence of SEQ ID NO: 561, an F17R promoter, or a D13L promoter.
[1437] 9. The nucleic acid of embodiment 7, wherein the late promoter comprises the nucleotide sequence of SEQ ID NO: 561.
[1438] 10. The nucleic acid of any one of embodiments 1-9, further comprising a nucleotide sequence comprising at least one promoter operably linked to the third nucleotide sequence encoding FLT3L.
[1439] 11. The nucleic acid of embodiment 10, wherein the at least one promoter operably linked to the third nucleotide sequence encoding FLT3L is a B8R promoter, a B19R promoter, a E3L promoter, an F 11L promoter, or a B2R promoter.
[1440] 12. The nucleic acid of embodiment 10, wherein the at least one promoter operably linked to the third nucleotide sequence encoding FLT3L is a B8R promoter.
[1441] 13. The nucleic acid of embodiment 10, wherein the at least one promoter operably linked to the third nucleotide sequence encoding FLT3L is a B19R promoter.
[1442] 14. The nucleic acid of embodiment 10, wherein the at least one promoter operably linked to the third nucleotide sequence encoding FLT3L is a B8R promoter and a B19R promoter.
[1443] 15. The nucleic acid of any one of embodiments 1-14, wherein the first transgene is present between the partial C2L and F3L vaccinia genes in SEQ ID NO: 210.
[1444] 16. The nucleic acid of any one of embodiments 1-14, wherein the second transgene is present between the partial C2L and F3L vaccinia genes in SEQ ID NO: 210.
[1445] 17. The nucleic acid of any one of embodiments 1-14, wherein the third transgene is present between the partial C2L and F3L vaccinia genes in SEQ ID NO: 210.
[1446] 18. The nucleic acid of any one of embodiments 1-14, wherein the first transgene is present in the locus of the deletion in the B8R gene.
[1447] 19. The nucleic acid of any one of embodiments 1-14, wherein the second transgene is present in the locus of the deletion in the B8R gene.
[1448] 20. The nucleic acid of any one of embodiments 1-14, wherein the third transgene is present in the locus of the deletion in the B8R gene.
[1449] 21. The nucleic acid of any one of embodiments 1-14, wherein the first transgene is present between the partial B14R and B29R vaccinia genes in SEQ ID NO: 210.
[1450] 22. The nucleic acid of any one of embodiments 1-14, wherein the second transgene is present between the partial B14R and B29R vaccinia genes in SEQ ID NO: 210.
[1451] 23. The nucleic acid of any one of embodiments 1-14, wherein the third transgene is present between the partial B14R and B29R vaccinia genes in SEQ ID NO: 210.
[1452] 24. The nucleic acid of any one of embodiments 1-14, wherein the first transgene and the second transgene are present between the partial C2L and F3L vaccinia genes in SEQ ID NO: 210.
[1453] 25. The nucleic acid of any one of embodiments 1-14, wherein the first transgene and the second transgene are present in the locus of the deletion in the B8R gene.
[1454] 26. The nucleic acid of any one of embodiments 1-14, wherein the first transgene and the second transgene are present between the partial B14R and B29R vaccinia genes in SEQ ID NO: 210.
[1455] 27. The nucleic acid of any one of embodiments 1-14, wherein the first transgene and the third transgene are present between the partial C2L and F3L vaccinia genes in SEQ ID NO: 210.
[1456] 28. The nucleic acid of any one of embodiments 1-14, wherein the first transgene and the third transgene are present in the locus of the deletion in the B8R gene.
[1457] 29. The nucleic acid of any one of embodiments 1-14, wherein the first transgene and the third transgene are present between the partial B14R and B29R vaccinia genes in SEQ ID NO: 210.
[1458] 30. The nucleic acid of any one of embodiments 1-14, wherein the second transgene and the third transgene are present between the partial C2L and F3L vaccinia genes in SEQ ID NO: 210.
[1459] 31. The nucleic acid of any one of embodiments 1-14, wherein the second transgene and the third transgene are present in the locus of the deletion in the B8R gene.
[1460] 32. The nucleic acid of any one of embodiments 1-14, wherein the second transgene and the third transgene are present between the partial B14R and B29R vaccinia genes in SEQ ID NO: 210.
[1461] 33. The nucleic acid of any one of embodiments 1-14, wherein the first transgene is present between the partial C2L and F3L vaccinia genes in SEQ ID NO: 210, and the second transgene is present in the locus of the deletion in the B8R gene.
[1462] 34. The nucleic acid of any one of embodiments 1-14, wherein the second transgene is present between the partial C2L and F3L vaccinia genes in SEQ ID NO: 210, and the first transgene is present in the locus of the deletion in the B8R gene.
[1463] 35. The nucleic acid of any one of embodiments 1-14, wherein the first transgene is present between the partial C2L and F3L vaccinia genes in SEQ ID NO: 210, and the third transgene is present in the locus of the deletion in the B8R gene.
[1464] 36. The nucleic acid of any one of embodiments 1-14, wherein the third transgene is present between the partial C2L and F3L vaccinia genes in SEQ ID NO: 210, and the first transgene is present in the locus of the deletion in the B8R gene.
[1465] 37. The nucleic acid of any one of embodiments 1-14, wherein the second transgene is present between the partial C2L and F3L vaccinia genes in SEQ ID NO: 210, and the third transgene is present in the locus of the deletion in the B8R gene.
[1466] 38. The nucleic acid of any one of embodiments 1-14, wherein the third transgene is present between the partial C2L and F3L vaccinia genes in SEQ ID NO: 210, and the second transgene is present in the locus of the deletion in the B8R gene.
[1467] 39. The nucleic acid of any one of embodiments 1-14, wherein the first transgene is present between the partial C2L and F3L vaccinia genes in SEQ ID NO: 210, and the second transgene is present between the partial B14R and B29R vaccinia genes in SEQ ID NO: 210.
[1468] 40. The nucleic acid of any one of embodiments 1-14, wherein the second transgene is present between the partial C2L and F3L vaccinia genes in SEQ ID NO: 210, and the first transgene is present between the partial B14R and B29R vaccinia genes in SEQ ID NO: 210.
[1469] 41. The nucleic acid of any one of embodiments 1-14, wherein the first transgene is present between the partial C2L and F3L vaccinia genes in SEQ ID NO: 210, and the third transgene is present between the partial B14R and B29R vaccinia genes in SEQ ID NO: 210.
[1470] 42. The nucleic acid of any one of embodiments 1-14, wherein the third transgene is present between the partial C2L and F3L vaccinia genes in SEQ ID NO: 210, and the first transgene is present between the partial B14R and B29R vaccinia genes in SEQ ID NO: 210.
[1471] 43. The nucleic acid of any one of embodiments 1-14, wherein the second transgene is present between the partial C2L and F3L vaccinia genes in SEQ ID NO: 210, and the third transgene is present between the partial B14R and B29R vaccinia genes in SEQ ID NO: 210.
[1472] 44. The nucleic acid of any one of embodiments 1-14, wherein the third transgene is present between the partial C2L and F3L vaccinia genes in SEQ ID NO: 210, and the second transgene is present between the partial B14R and B29R vaccinia genes in SEQ ID NO: 210.
[1473] 45. The nucleic acid of any one of embodiments 1-14, wherein the first transgene is present in the locus of the deletion in the B8R gene, and the second transgene is present between the partial B14R and B29R vaccinia genes in SEQ ID NO: 210.
[1474] 46. The nucleic acid of any one of embodiments 1-14, wherein the second transgene is present in the locus of the deletion in the B8R gene, and the first transgene is present between the partial B14R and B29R vaccinia genes in SEQ ID NO: 210.
[1475] 47. The nucleic acid of any one of embodiments 1-14, wherein the first transgene is present in the locus of the deletion in the B8R gene, and the third transgene is present between the partial B14R and B29R vaccinia genes in SEQ ID NO: 210.
[1476] 48. The nucleic acid of any one of embodiments 1-14, wherein the third transgene is present in the locus of the deletion in the B8R gene, and the first transgene is present between the partial B14R and B29R vaccinia genes in SEQ ID NO: 210.
[1477] 49. The nucleic acid of any one of embodiments 1-14, wherein the second transgene is present in the locus of the deletion in the B8R gene, and the third transgene is present between the partial B14R and B29R vaccinia genes in SEQ ID NO: 210.
[1478] 50. The nucleic acid of any one of embodiments 1-14, wherein the third transgene is present in the locus of the deletion in the B8R gene, and the second transgene is present between the partial B14R and B29R vaccinia genes in SEQ ID NO: 210.
[1479] 51. The nucleic acid of any one of embodiments 1-14, wherein the first transgene, the second transgene, and the third transgene are present between the partial C2L and F3L vaccinia genes in SEQ ID NO: 210.
[1480] 52. The nucleic acid of any one of embodiments 1-14, wherein the first transgene, the second transgene, and the third transgene are present in the locus of the deletion in the B8R gene.
[1481] 53. The nucleic acid of any one of embodiments 1-14, wherein the first transgene, the second transgene, and the third transgene are present between the partial B14R and B29R vaccinia genes in SEQ ID NO: 210.
[1482] 54. The nucleic acid of any one of embodiments 1-14, wherein the first transgene is present between the partial C2L and F3L vaccinia genes in SEQ ID NO: 210, and the second transgene and the third transgene are present in the locus of the deletion in the B8R gene.
[1483] 55. The nucleic acid of any one of embodiments 1-14, wherein the second transgene is present between the partial C2L and F3L vaccinia genes in SEQ ID NO: 210, and the first transgene and the third transgene are present in the locus of the deletion in the B8R gene.
[1484] 56. The nucleic acid of any one of embodiments 1-14, wherein the third transgene is present between the partial C2L and F3L vaccinia genes in SEQ ID NO: 210, and the first transgene and the second transgene are present in the locus of the deletion in the B8R gene. 0

[1485] 57. The nucleic acid of any one of embodiments 1-14, wherein the first transgene and the second transgene are present between the partial C2L and F3L vaccinia genes in SEQ ID NO: 210, and the third transgene is present in the locus of the deletion in the B8R gene.
[1486] 58. The nucleic acid of any one of embodiments 1-14, wherein the first transgene and the third transgene are present between the partial C2L and F3L vaccinia genes in SEQ ID NO: 210, and the second transgene is present in the locus of the deletion in the B8R gene.
[1487] 59. The nucleic acid of any one of embodiments 1-14, wherein the second transgene and the third transgene are present between the partial C2L and F3L vaccinia genes in SEQ ID NO: 210, and the first transgene is present in the locus of the deletion in the B8R gene.
[1488] 60. The nucleic acid of any one of embodiments 1-14, wherein the first transgene is present between the partial C2L and F3L vaccinia genes in SEQ ID NO: 210, and the second transgene and the third transgene are present between the partial B14R and B29R vaccinia genes in SEQ ID NO: 210.
[1489] 61. The nucleic acid of any one of embodiments 1-14, wherein the second transgene is present between the partial C2L and F3L vaccinia genes in SEQ ID NO: 210, and the first transgene and the third transgene are present between the partial B14R and B29R vaccinia genes in SEQ ID NO: 210.
[1490] 62. The nucleic acid of any one of embodiments 1-14, wherein the third transgene is present between the partial C2L and F3L vaccinia genes in SEQ ID NO: 210, and the first transgene and the second transgene are present between the partial B14R and B29R vaccinia genes in SEQ ID NO: 210.
[1491] 63. The nucleic acid of any one of embodiments 1-14, wherein the first transgene and the second transgene are present between the partial C2L and F3L vaccinia genes in SEQ ID NO: 210, and the third transgene is present between the partial B14R and B29R vaccinia genes in SEQ ID NO: 210.
[1492] 64. The nucleic acid of any one of embodiments 1-14, wherein the first transgene and the third transgene are present between the partial C2L and F3L vaccinia genes in SEQ ID NO: 210, and the second transgene is present between the partial B14R and B29R vaccinia genes in SEQ ID NO: 210.
[1493] 65. The nucleic acid of any one of embodiments 1-14, wherein the second transgene and the third transgene are present between the partial C2L and F3L vaccinia genes in SEQ ID NO: 210, and the first transgene is present between the partial B14R and B29R vaccinia genes in SEQ ID NO: 210.
[1494] 66. The nucleic acid of any one of embodiments 1-14, wherein the first transgene is present in the locus of the deletion in the B8R gene, and the second transgene and the third transgene are present between the partial B14R and B29R vaccinia genes in SEQ ID NO: 210.
[1495] 67. The nucleic acid of any one of embodiments 1-14, wherein the second transgene is present in the locus of the deletion in the B8R gene, and the first transgene and the third transgene are present between the partial B14R and B29R vaccinia genes in SEQ ID NO: 210.
[1496] 68. The nucleic acid of any one of embodiments 1-14, wherein the third transgene is present in the locus of the deletion in the B8R gene, and the first transgene and the second transgene are present between the partial B14R and B29R vaccinia genes in SEQ ID NO: 210.
[1497] 69. The nucleic acid of any one of embodiments 1-14, wherein the first transgene and the second transgene are present in the locus of the deletion in the B8R gene, and the third transgene is present between the partial B14R and B29R vaccinia genes in SEQ ID NO: 210.
[1498] 70. The nucleic acid of any one of embodiments 1-14, wherein the first transgene and the third transgene are present in the locus of the deletion in the B8R gene, and the second transgene is present between the partial B14R and B29R vaccinia genes in SEQ ID NO: 210.
[1499] 71. The nucleic acid of any one of embodiments 1-14, wherein the second transgene and the third transgene are present in the locus of the deletion in the B8R gene, and the first transgene is present between the partial B14R and B29R vaccinia genes in SEQ ID NO: 210.
[1500] 72. The nucleic acid of any one of embodiments 1-14, wherein the first transgene is present between the partial C2L and F3L vaccinia genes in SEQ ID NO: 210, the second transgene is present in the locus of the deletion in the B8R gene, and the third transgene is present between the partial B14R and B29R vaccinia genes in SEQ ID NO: 210.
[1501] 73. The nucleic acid of any one of embodiments 1-14, wherein the first transgene is present between the partial C2L and F3L vaccinia genes in SEQ ID NO: 210, the third transgene is present in the locus of the deletion in the B8R gene, and the second transgene is present between the partial B14R and B29R vaccinia genes in SEQ ID NO: 210.
[1502] 74. The nucleic acid of any one of embodiments 1-14, wherein the second transgene is present between the partial C2L and F3L vaccinia genes in SEQ ID NO: 210, the first transgene is present in the locus of the deletion in the B8R gene, and the third transgene is present between the partial B14R and B29R vaccinia genes in SEQ ID NO: 210.
[1503] 75. The nucleic acid of any one of embodiments 1-14, wherein the second transgene is present between the partial C2L and F3L vaccinia genes in SEQ ID NO: 210, the third transgene is present in the locus of the deletion in the B8R gene, and the first transgene is present between the partial B14R and B29R vaccinia genes in SEQ ID NO: 210.
[1504] 76. The nucleic acid of any one of embodiments 1-14, wherein the third transgene is present between the partial C2L and F3L vaccinia genes in SEQ ID NO: 210, the first transgene is present in the locus of the deletion in the B8R gene, and the second transgene is present between the partial B14R and B29R vaccinia genes in SEQ ID NO: 210.
[1505] 77. The nucleic acid of any one of embodiments 1-14, wherein the third transgene is present between the partial C2L and F3L vaccinia genes in SEQ ID NO: 210, the second transgene is present in the locus of the deletion in the B8R gene, and the first transgene is present between the partial B14R and B29R vaccinia genes in SEQ ID NO: 210.
[1506] 78. A nucleic acid comprising a recombinant vaccinia virus genome, comprising:
   [1507] (a) a vaccinia virus nucleotide sequence of SEQ ID NO: 210, which comprises partial C2L, F3L, B14R, and B29R vaccinia genes and which comprises a deletion in the B8R gene;
   [1508] (b) a first transgene comprising a first nucleotide sequence encoding an antibody that specifically binds to CTLA-4, wherein the first nucleotide sequence is set forth in SEQ ID NO: 214;
   [1509] (c) a second transgene comprising a second nucleotide sequence encoding an IL-12 polypeptide, wherein the second nucleotide sequence is set forth in SEQ ID NO: 215; and
   [1510] (d) a third transgene comprising a third nucleotide sequence encoding FLT3L, wherein the third nucleotide sequence is set forth in SEQ ID NO: 216; wherein the nucleic acid further comprises:
   [1511] (i) a nucleotide sequence comprising at least one promoter operably linked to the first nucleotide sequence, wherein the at least one promoter operably linked to the first nucleotide sequence is an H5R promoter;
   [1512] (ii) a nucleotide sequence comprising at least one promoter operably linked to the second nucleotide sequence, wherein the at least one promoter operably linked to the second nucleotide sequence is a late promoter that comprises the nucleotide sequence of SEQ ID NO: 561; and
   [1513] (iii) a nucleotide sequence comprising at least one promoter operably linked to the third nucleotide sequence, wherein the at least one promoter operably linked to the third nucleotide sequence is a B8R promoter and a B19R promoter.
[1514] 79. The nucleic acid of embodiment 78, wherein the first nucleotide sequence is in the same orientation as endogenous vaccinia virus genes that flank the first nucleotide sequence, the second nucleotide sequence is in the same orientation as endogenous vaccinia virus genes that flank the second nucleotide sequence, and the third nucleotide sequence is in the same orientation as endogenous vaccinia virus genes that flank the third nucleotide sequence.
[1515] 80. The nucleic acid of embodiment 78 or 79, wherein the first transgene is present between the partial C2L and F3L vaccinia genes in SEQ ID NO: 210, and the second transgene and the third transgene are present in the locus of the deletion in the B8R gene.
[1516] 81. The nucleic acid of embodiment 78 or 79, wherein the first transgene is present between the partial B14R and B29R vaccinia genes in SEQ ID NO: 210, and the second transgene and the third transgene are present in the locus of the deletion in the B8R gene.
[1517] 82. The nucleic acid of embodiment 80 or 81, wherein the third transgene is upstream of the second transgene.
[1518] 83. The nucleic acid of embodiment 80 or 81, wherein the third transgene is downstream of the second transgene.
[1519] 84. A nucleic acid comprising a recombinant vaccinia virus genome, comprising:
   [1520] (a) a vaccinia virus nucleotide sequence of SEQ ID NO: 210, which comprises partial C2L, F3L, B14R, and B29R vaccinia genes and which comprises a deletion in the B8R gene;
   [1521] (b) a first transgene comprising a first nucleotide sequence encoding an antibody that specifically binds to CTLA-4, wherein the first nucleotide sequence is set forth in SEQ ID NO: 214, and wherein the first nucleotide sequence is in the same orientation as endogenous vaccinia virus genes that flank the first nucleotide sequence and the first transgene is present between the partial C2L and F3L vaccinia genes the vaccinia virus nucleotide sequence of SEQ ID NO: 210;
   [1522] (c) a second transgene comprising a second nucleotide sequence encoding an IL-12 polypeptide, wherein the second nucleotide sequence is set forth in SEQ ID NO: 215, and wherein the second nucleotide sequence is in the same orientation as endogenous vaccinia virus genes that flank the second nucleotide sequence and the second transgene is present in the locus of the deletion in the B8R gene of the vaccinia virus nucleotide sequence of SEQ ID NO: 210; and
   [1523] (d) a third transgene comprising a third nucleotide sequence encoding FLT3L, wherein the third nucleotide sequence is set forth in SEQ ID NO: 216, wherein the third nucleotide sequence is in the same orientation as endogenous vaccinia virus genes that flank the third nucleotide sequence and the third transgene is present in the locus of the deletion in the B8R gene of the vaccinia virus nucleotide sequence of SEQ ID NO: 210, and wherein the third transgene is upstream of the second transgene;
   [1524] wherein the nucleic acid further comprises:
   [1525] (i) a nucleotide sequence comprising at least one promoter operably linked to the first nucleotide sequence, wherein the at least one promoter operably linked to the first nucleotide sequence is an H5R promoter;
   [1526] (ii) a nucleotide sequence comprising at least one promoter operably linked to the second nucleotide sequence, wherein the at least one promoter operably linked to the second nucleotide sequence is a late promoter that comprises the nucleotide sequence of SEQ ID NO: 561; and
   [1527] (iii) a nucleotide sequence comprising at least one promoter operably linked to the third nucleotide sequence, wherein the at least one promoter operably linked to the third nucleotide sequence is a B8R promoter or a B19R promoter.
[1528] 85. The nucleic acid of embodiment 84, wherein the at least one promoter operably linked to the third nucleotide sequence is a B8R promoter and a B19R promoter.
[1529] 86. The nucleic acid of embodiment 85, wherein the B8R promoter comprises the nucleotide sequence of SEQ ID NO: 564 and the B19R promoter comprises the nucleotide sequence of SEQ ID NO: 565.
[1530] 87. The nucleic acid of any one of embodiments 84-86, wherein the at least one promoter operatively linked to the first nucleotide sequence is an H5R early promoter or an H5R late promoter.
[1531] 88. The nucleic acid of embodiment 87, wherein the at least one promoter operatively linked to the first nucleotide sequence is an H5R early promoter and an H5R late promoter.
[1532] 89. The nucleic acid of embodiment 88, wherein the H5R early promoter comprises the nucleotide sequence of SEQ ID NO: 553 and the H5R late promoter comprises the nucleotide sequence of SEQ ID NO: 554.
[1533] 90. A nucleic acid comprising a recombinant vaccinia virus genome, comprising:
   [1534] (a) a vaccinia virus nucleotide sequence of SEQ ID NO: 210, which comprises partial C2L, F3L, B14R, and B29R vaccinia genes and which comprises a deletion in the B8R gene;
   [1535] (b) a first transgene comprising a first nucleotide sequence encoding an antibody that specifically binds to CTLA-4, wherein the first nucleotide sequence is set forth in SEQ ID NO: 214, and wherein the first nucleotide sequence is in the same orientation as endogenous vaccinia virus genes that flank the first nucleotide sequence and the first transgene is present between the partial C2L and F3L vaccinia genes of the vaccinia virus nucleotide sequence of SEQ ID NO: 210;
   [1536] (c) a second transgene comprising a second nucleotide sequence encoding an IL-12 polypeptide, wherein the second nucleotide sequence is set forth in SEQ ID NO: 215, and wherein the second nucleotide sequence is in the same orientation as endogenous vaccinia virus genes that flank the second nucleotide sequence and the second transgene is present in the locus of the deletion in the B8R gene of the vaccinia virus nucleotide sequence of SEQ ID NO: 210; and
   [1537] (d) a third transgene comprising a third nucleotide sequence encoding FLT3L, wherein the third nucleotide sequence is set forth in SEQ ID NO: 216, wherein the third nucleotide sequence is in the same orientation as endogenous vaccinia virus genes that flank the third nucleotide sequence and the third transgene is present in the locus of the deletion in the B8R gene of the vaccinia virus nucleotide sequence of SEQ ID NO: 210, and wherein the third transgene is downstream of the second transgene;
   [1538] wherein the nucleic acid further comprises:
   [1539] (i) a nucleotide sequence comprising at least one promoter operably linked to the first nucleotide sequence, wherein the at least one promoter operably linked to the first nucleotide sequence is an H5R promoter;
   [1540] (ii) a nucleotide sequence comprising at least one promoter operably linked to the second nucleotide sequence, wherein the at least one promoter operably linked to the second nucleotide sequence is a late promoter that comprises the nucleotide sequence of SEQ ID NO: 561; and
   [1541] (iii) a nucleotide sequence comprising at least one promoter operably linked to the third nucleotide sequence, wherein the at least one promoter operably linked to the third nucleotide sequence is a B8R promoter or a B19R promoter.
[1542] 91. The nucleic acid of embodiment 90, wherein the at least one promoter operably linked to the third nucleotide sequence is a B8R promoter and a B19R promoter.
[1543] 92. The nucleic acid of embodiment 91, wherein the B8R promoter comprises the nucleotide sequence of SEQ ID NO: 564 and the B19R promoter comprises the nucleotide sequence of SEQ ID NO: 565.
[1544] 93. The nucleic acid of any one of embodiments 90-92, wherein the at least one promoter operatively linked to the first nucleotide sequence is an H5R early promoter or an H5R late promoter.
[1545] 94. The nucleic acid of embodiment 93, wherein the at least one promoter operatively linked to the first nucleotide sequence is an H5R early promoter and an H5R late promoter.
[1546] 95. The nucleic acid of embodiment 94, wherein the H5R early promoter comprises the nucleotide sequence of SEQ ID NO: 553 and the H5R late promoter comprises the nucleotide sequence of SEQ ID NO: 554.
[1547] 96. A nucleic acid comprising a recombinant vaccinia virus genome, comprising:
   [1548] (a) a vaccinia virus nucleotide sequence of SEQ ID NO: 210, which comprises partial C2L, F3L, B14R, and B29R vaccinia genes and which comprises a deletion in the B8R gene;
   [1549] (b) a first transgene comprising a first nucleotide sequence encoding an antibody that specifically binds to CTLA-4, wherein the first nucleotide sequence is set forth in SEQ ID NO: 214, and wherein the first nucleotide sequence is in the same orientation as endogenous vaccinia virus genes that flank the first nucleotide sequence and the first transgene is present between the partial B14R and B29R vaccinia genes in SEQ ID NO: 210;
   [1550] (c) a second transgene comprising a second nucleotide sequence encoding an IL-12 polypeptide, wherein the second nucleotide sequence is set forth in SEQ ID NO: 215, and wherein the second nucleotide sequence is in the same orientation as endogenous vaccinia virus genes that flank the second nucleotide sequence and the second transgene is present in the locus of the deletion in the B8R gene of the vaccinia virus nucleotide sequence of SEQ ID NO: 210; and
   [1551] (d) a third transgene comprising a third nucleotide sequence encoding FLT3L, wherein the third nucleotide sequence is set forth in SEQ ID NO: 216, wherein the third nucleotide sequence is in the same orientation as endogenous vaccinia virus genes that flank the third nucleotide sequence and the third transgene is present in the locus of the deletion in the B8R gene of the vaccinia virus nucleotide sequence of SEQ ID NO: 210, and wherein the third transgene is upstream of the second transgene; 1

[1552] wherein the nucleic acid further comprises:
[1553] (i) a nucleotide sequence comprising at least one promoter operably linked to the first nucleotide sequence, wherein the at least one promoter operably linked to the first nucleotide sequence is an H5R promoter;
[1554] (ii) a nucleotide sequence comprising at least one promoter operably linked to the second nucleotide sequence, wherein the at least one promoter operably linked to the second nucleotide sequence is a late promoter that comprises the nucleotide sequence of SEQ ID NO: 561; and
[1555] (iii) a nucleotide sequence comprising at least one promoter operably linked to the third nucleotide sequence, wherein the at least one promoter operably linked to the third nucleotide sequence is a B8R promoter or a B19R promoter.
[1556] 97. The nucleic acid of embodiment 96, wherein the at least one promoter operably linked to the third nucleotide sequence is a B8R promoter and a B19R promoter.
[1557] 98. The nucleic acid of embodiment 97, wherein the B8R promoter comprises the nucleotide sequence of SEQ ID NO: 564 and the B19R promoter comprises the nucleotide sequence of SEQ ID NO: 565.
[1558] 99. The nucleic acid of any one of embodiments 96-98, wherein the at least one promoter operatively linked to the first nucleotide sequence is an H5R early promoter or an H5R late promoter.
[1559] 100. The nucleic acid of embodiment 99, wherein the at least one promoter operatively linked to the first nucleotide sequence is an H5R early promoter and an H5R late promoter.
[1560] 101. The nucleic acid of embodiment 100, wherein the H5R early promoter comprises the nucleotide sequence of SEQ ID NO: 553 and the H5R late promoter comprises the nucleotide sequence of SEQ ID NO: 554.
[1561] 102. A nucleic acid comprising a recombinant vaccinia virus genome, comprising:
   [1562] (a) a vaccinia virus nucleotide sequence of SEQ ID NO: 210, which comprises partial C2L, F3L, B14R, and B29R vaccinia genes and which comprises a deletion in the B8R gene;
   [1563] (b) a first transgene comprising a first nucleotide sequence encoding an antibody that specifically binds to CTLA-4, wherein the first nucleotide sequence is set forth in SEQ ID NO: 214, and wherein the first nucleotide sequence is in the same orientation as endogenous vaccinia virus genes that flank the first nucleotide sequence and the first transgene is present between the partial B14R and B29R vaccinia genes of the vaccinia virus nucleotide sequence of SEQ ID NO: 210;
   [1564] (c) a second transgene comprising a second nucleotide sequence encoding an IL-12 polypeptide, wherein the second nucleotide sequence is set forth in SEQ ID NO: 215, and wherein the second nucleotide sequence is in the same orientation as endogenous vaccinia virus genes that flank the second nucleotide sequence and the second transgene is present in the locus of the deletion in the B8R gene of the vaccinia virus nucleotide sequence of SEQ ID NO: 210; and
   [1565] (d) a third transgene comprising a third nucleotide sequence encoding FLT3L, wherein the third nucleotide sequence is set forth in SEQ ID NO: 216, wherein the third nucleotide sequence is in the same orientation as endogenous vaccinia virus genes that flank the third nucleotide sequence and the third transgene is present in the locus of the deletion in the B8R gene of the vaccinia virus nucleotide sequence of SEQ ID NO: 210, and wherein the third transgene is downstream of the second transgene;
   [1566] wherein the nucleic acid further comprises:
   [1567] (i) a nucleotide sequence comprising at least one promoter operably linked to the first nucleotide sequence, wherein the at least one promoter operably linked to the first nucleotide sequence is an H5R promoter;
   [1568] (ii) a nucleotide sequence comprising at least one promoter operably linked to the second nucleotide sequence, wherein the at least one promoter operably linked to the second nucleotide sequence is a late promoter that comprises the nucleotide sequence of SEQ ID NO: 561; and
   [1569] (iii) a nucleotide sequence comprising at least one promoter operably linked to the third nucleotide sequence, wherein the at least one promoter operably linked to the third nucleotide sequence is a B8R promoter or a B19R promoter.
[1570] 103. The nucleic acid of embodiment 102, wherein the at least one promoter operably linked to the third nucleotide sequence is a B8R promoter and a B19R promoter.
[1571] 104. The nucleic acid of embodiment 103, wherein the B8R promoter comprises the nucleotide sequence of SEQ ID NO: 564 and the B19R promoter comprises the nucleotide sequence of SEQ ID NO: 565.
[1572] 105. The nucleic acid of any one of embodiments 102-104, wherein the at least one promoter operatively linked to the first nucleotide sequence is an H5R early promoter or an H5R late promoter.
[1573] 106. The nucleic acid of embodiment 105, wherein the at least one promoter operatively linked to the first nucleotide sequence is an H5R early promoter and an H5R late promoter.
[1574] 107. The nucleic acid of embodiment 106, wherein the H5R early promoter comprises the nucleotide sequence of SEQ ID NO: 553 and the H5R late promoter comprises the nucleotide sequence of SEQ ID NO: 554.
[1575] 108. A nucleic acid comprising a recombinant vaccinia virus genome, comprising:
   [1576] (a) a vaccinia virus nucleotide sequence of SEQ ID NO: 210, which comprises partial C2L, F3L, B14R, and B29R vaccinia genes and which comprises a deletion in the B8R gene;
   [1577] (b) a first transgene comprising a first nucleotide sequence encoding an antibody that specifically binds to CTLA-4, wherein the first nucleotide sequence is set forth in SEQ ID NO: 214, and wherein the first nucleotide sequence is in the same orientation as endogenous vaccinia virus genes that flank the first nucleotide sequence and the first transgene is present between the partial C2L and F3L vaccinia genes of the vaccinia virus nucleotide sequence of SEQ ID NO: 210;
   [1578] (c) a second transgene comprising a second nucleotide sequence encoding an IL-12 polypeptide, wherein the second nucleotide sequence is set forth in SEQ ID NO: 215, and wherein the second nucleotide sequence is in the same orientation as endogenous vaccinia virus genes that flank the second nucleotide sequence and the second transgene is present in the locus of the deletion in the B8R gene of the vaccinia virus nucleotide sequence of SEQ ID NO: 210; and
   [1579] (d) a third transgene comprising a third nucleotide sequence encoding FLT3L, wherein the third nucleotide sequence is set forth in SEQ ID NO: 216, wherein the third nucleotide sequence is in the same orientation as endogenous vaccinia virus genes that flank the third nucleotide sequence and the third transgene is present in the locus of the deletion in the B8R gene of the vaccinia virus nucleotide sequence of SEQ ID NO: 210, and wherein the third transgene is upstream of the second transgene;
   [1580] wherein the nucleic acid further comprises:
   [1581] (i) a nucleotide sequence comprising at least one promoter operably linked to the first nucleotide sequence, wherein the at least one promoter operably linked to the first nucleotide sequence is a pS promoter;
   [1582] (ii) a nucleotide sequence comprising at least one promoter operably linked to the second nucleotide sequence, wherein the at least one promoter operably linked to the second nucleotide sequence is a late promoter that comprises the nucleotide sequence of SEQ ID NO: 561; and
   [1583] (iii) a nucleotide sequence comprising at least one promoter operably linked to the third nucleotide sequence, wherein the at least one promoter operably linked to the third nucleotide sequence is a B8R promoter or a B19R promoter.
[1584] 109. The nucleic acid of embodiment 108, wherein the at least one promoter operably linked to the third nucleotide sequence is a B8R promoter and a B19R promoter.
[1585] 110. The nucleic acid of embodiment 109, wherein the B8R promoter comprises the nucleotide sequence of SEQ ID NO: 564 and the B19R promoter comprises the nucleotide sequence of SEQ ID NO: 565.
[1586] 111. The nucleic acid of any one of embodiments 108-110, wherein the nucleotide sequence of the pS comprises the nucleotide sequence of SEQ ID NO: 555, SEQ ID NO: 556, or SEQ ID NO: 557.
[1587] 112. A nucleic acid comprising a recombinant vaccinia virus genome, comprising:
   [1588] (a) a vaccinia virus nucleotide sequence of SEQ ID NO: 210, which comprises partial C2L, F3L, B14R, and B29R vaccinia genes and which comprises a deletion in the B8R gene;
   [1589] (b) a first transgene comprising a first nucleotide sequence encoding an antibody that specifically binds to CTLA-4, wherein the first nucleotide sequence is set forth in SEQ ID NO: 214, and wherein the first nucleotide sequence is in the same orientation as endogenous vaccinia virus genes that flank the first nucleotide sequence and the first transgene is present between the partial C2L and F3L vaccinia genes of the vaccinia virus nucleotide sequence of SEQ ID NO: 210;
   [1590] (c) a second transgene comprising a second nucleotide sequence encoding an IL-12 polypeptide, wherein the second nucleotide sequence is set forth in SEQ ID NO: 215, and wherein the second nucleotide sequence is in the same orientation as endogenous vaccinia virus genes that flank the second nucleotide sequence and the second transgene is present in the locus of the deletion in the B8R gene of the vaccinia virus nucleotide sequence of SEQ ID NO: 210; and
   [1591] (d) a third transgene comprising a third nucleotide sequence encoding FLT3L, wherein the third nucleotide sequence is set forth in SEQ ID NO: 216, wherein the third nucleotide sequence is in the same orientation as endogenous vaccinia virus genes that flank the third nucleotide sequence and the third transgene is present in the locus of the deletion in the B8R gene of the vaccinia virus nucleotide sequence of SEQ ID NO: 210, and wherein the third transgene is downstream of the second transgene;
   [1592] wherein the nucleic acid further comprises:
   [1593] (i) a nucleotide sequence comprising at least one promoter operably linked to the first nucleotide sequence, wherein the at least one promoter operably linked to the first nucleotide sequence is a pS promoter;
   [1594] (ii) a nucleotide sequence comprising at least one promoter operably linked to the second nucleotide sequence, wherein the at least one promoter operably linked to the second nucleotide sequence is a late promoter that comprises the nucleotide sequence of SEQ ID NO: 561; and
   [1595] (iii) a nucleotide sequence comprising at least one promoter operably linked to the third nucleotide sequence, wherein the at least one promoter operably linked to the third nucleotide sequence is a B8R promoter or a B19R promoter.
[1596] 113. The nucleic acid of embodiment 112, wherein the at least one promoter operably linked to the third nucleotide sequence is a B8R promoter and a B19R promoter.
[1597] 114. The nucleic acid of embodiment 113, wherein the B8R promoter comprises the nucleotide sequence of SEQ ID NO: 564 and the B19R promoter comprises the nucleotide sequence of SEQ ID NO: 565.
[1598] 115. The nucleic acid of any one of embodiments 112-114, wherein the nucleotide sequence of the pS comprises the nucleotide sequence of SEQ ID NO: 555, SEQ ID NO: 556, or SEQ ID NO: 557.
[1599] 116. A nucleic acid comprising a recombinant vaccinia virus genome, comprising:
   [1600] (a) a vaccinia virus nucleotide sequence of SEQ ID NO: 210, which comprises partial C2L, F3L, B14R, and B29R vaccinia genes and which comprises a deletion in the B8R gene;
   [1601] (b) a first transgene comprising a first nucleotide sequence encoding an antibody that specifically binds to CTLA-4, wherein the first nucleotide sequence is set forth in SEQ ID NO: 214, and wherein the first nucleotide sequence is in the same orientation as endogenous vaccinia virus genes that flank the first nucleotide sequence and the first transgene is present between the partial B14R and B29R vaccinia genes of the vaccinia virus nucleotide sequence of SEQ ID NO: 210;
   [1602] (c) a second transgene comprising a second nucleotide sequence encoding an IL-12 polypeptide, wherein the second nucleotide sequence is set forth in SEQ ID NO: 215, and wherein the second nucleotide sequence is in the same orientation as endogenous vaccinia virus genes that flank the second nucleotide sequence and the second transgene is present in the locus of the deletion in the B8R gene of the vaccinia virus nucleotide sequence of SEQ ID NO: 210; and
   [1603] (d) a third transgene comprising a third nucleotide sequence encoding FLT3L, wherein the third nucleotide sequence is set forth in SEQ ID NO: 216, wherein the third nucleotide sequence is in the same orientation as endogenous vaccinia virus genes that flank the third nucleotide sequence and the third transgene is present in the locus of the deletion in the B8R gene of the vaccinia virus nucleotide sequence of SEQ ID NO: 210, and wherein the third transgene is upstream of the second transgene;
   [1604] wherein the nucleic acid further comprises:
   [1605] (i) a nucleotide sequence comprising at least one promoter operably linked to the first nucleotide sequence, wherein the at least one promoter operably linked to the first nucleotide sequence is a pS promoter;
   [1606] (ii) a nucleotide sequence comprising at least one promoter operably linked to the second nucleotide sequence, wherein the at least one promoter operably linked to the second nucleotide sequence is a late promoter that comprises the nucleotide sequence of SEQ ID NO: 561; and
   [1607] (iii) a nucleotide sequence comprising at least one promoter operably linked to the third nucleotide sequence, wherein the at least one promoter operably linked to the third nucleotide sequence is a B8R promoter or a B19R promoter.
[1608] 117. The nucleic acid of embodiment 116, wherein the at least one promoter operably linked to the third nucleotide sequence is a B8R promoter and a B19R promoter.
[1609] 118. The nucleic acid of embodiment 117, wherein the B8R promoter comprises the nucleotide sequence of SEQ ID NO: 564 and the B19R promoter comprises the nucleotide sequence of SEQ ID NO: 565.
[1610] 119. The nucleic acid of any one of embodiments 116-118, wherein the nucleotide sequence of the pS comprises the nucleotide sequence of SEQ ID NO: 555, SEQ ID NO: 556, or SEQ ID NO: 557.
[1611] 120. A nucleic acid comprising a recombinant vaccinia virus genome, comprising:
   [1612] (a) a vaccinia virus nucleotide sequence of SEQ ID NO: 210, which comprises partial C2L, F3L, B14R, and B29R vaccinia genes and which comprises a deletion in the B8R gene;
   [1613] (b) a first transgene comprising a first nucleotide sequence encoding an antibody that specifically binds to CTLA-4, wherein the first nucleotide sequence is set forth in SEQ ID NO: 214, and wherein the first nucleotide sequence is in the same orientation as endogenous vaccinia virus genes that flank the first nucleotide sequence and the first transgene is present between the partial B14R and B29R vaccinia genes of the vaccinia virus nucleotide sequence of SEQ ID NO: 210;
   [1614] (c) a second transgene comprising a second nucleotide sequence encoding an IL-12 polypeptide, wherein the second nucleotide sequence is set forth in SEQ ID NO: 215, and wherein the second nucleotide sequence is in the same orientation as endogenous vaccinia virus genes that flank the second nucleotide sequence and the second transgene is present in the locus of the deletion in the B8R gene of the vaccinia virus nucleotide sequence of SEQ ID NO: 210; and
   [1615] (d) a third transgene comprising a third nucleotide sequence encoding FLT3L, wherein the third nucleotide sequence is set forth in SEQ ID NO: 216, wherein the third nucleotide sequence is in the same orientation as endogenous vaccinia virus genes that flank the third nucleotide sequence and the third transgene is present in the locus of the deletion in the B8R gene of the vaccinia virus nucleotide sequence of SEQ ID NO: 210, and wherein the third transgene is downstream of the second transgene;
   [1616] wherein the nucleic acid further comprises:
   [1617] (i) a nucleotide sequence comprising at least one promoter operably linked to the first nucleotide sequence, wherein the at least one promoter operably linked to the first nucleotide sequence is a pS promoter;
   [1618] (ii) a nucleotide sequence comprising at least one promoter operably linked to the second nucleotide sequence, wherein the at least one promoter operably linked to the second nucleotide sequence is a late promoter that comprises the nucleotide sequence of SEQ ID NO: 561; and
   [1619] (iii) a nucleotide sequence comprising at least one promoter operably linked to the third nucleotide sequence, wherein the at least one promoter operably linked to the third nucleotide sequence is a B8R promoter or a B19R promoter.
[1620] 121. The nucleic acid of embodiment 120, wherein the at least one promoter operably linked to the third nucleotide sequence is a B8R promoter and a B19R promoter.
[1621] 122. The nucleic acid of embodiment 121, wherein the B8R promoter comprises the nucleotide sequence of SEQ ID NO: 564 and the B19R promoter comprises the nucleotide sequence of SEQ ID NO: 565.
[1622] 123. The nucleic acid of any one of embodiments 120-122, wherein the nucleotide sequence of the pS comprises the nucleotide sequence of SEQ ID NO: 555, SEQ ID NO: 556, or SEQ ID NO: 557.
[1623] 124. A nucleic acid comprising a recombinant vaccinia virus genome, comprising:
   [1624] (a) a vaccinia virus nucleotide sequence of SEQ ID NO: 210, which comprises partial C2L, F3L, B14R, and B29R vaccinia genes and which comprises a deletion in the B8R gene;
   [1625] (b) a first transgene comprising a first nucleotide sequence encoding an antibody that specifically binds to CTLA-4, wherein the first nucleotide sequence is set forth in SEQ ID NO: 214, and wherein the first nucleotide sequence is in the same orientation as endogenous vaccinia virus genes that flank the first nucleotide sequence and the first transgene is present between the partial C2L and F3L vaccinia genes of the vaccinia virus nucleotide sequence of SEQ ID NO: 210;
   [1626] (c) a second transgene comprising a second nucleotide sequence encoding an IL-12 polypeptide, wherein the second nucleotide sequence is set forth in SEQ ID NO: 215, and wherein the second nucleotide sequence is in the same orientation as endogenous vaccinia virus genes that flank the second nucleotide sequence and the second transgene is present in the locus of the deletion in the B8R gene of the vaccinia virus nucleotide sequence of SEQ ID NO: 210; and
   [1627] (d) a third transgene comprising a third nucleotide sequence encoding FLT3L, wherein the third nucleotide sequence is set forth in SEQ ID NO: 216, wherein the third nucleotide sequence is in the same orientation as endogenous vaccinia virus genes that flank the third nucleotide sequence and the third transgene is present in the locus of the deletion in the B8R gene of the vaccinia virus nucleotide sequence of SEQ ID NO: 210, and wherein the third transgene is upstream of the second transgene;
   [1628] wherein the nucleic acid further comprises:
   [1629] (i) a nucleotide sequence comprising at least one promoter operably linked to the first nucleotide sequence, wherein the at least one promoter operably linked to the first nucleotide sequence is an H5R promoter;
   [1630] (ii) a nucleotide sequence comprising at least one promoter operably linked to the second nucleotide sequence, wherein the at least one promoter operably linked to the second nucleotide sequence is an F17R promoter; and
   [1631] (iii) a nucleotide sequence comprising at least one promoter operably linked to the third nucleotide sequence, wherein the at least one promoter operably linked to the third nucleotide sequence is a B8R promoter or a B19R promoter.
[1632] 125. The nucleic acid of embodiment 124, wherein the at least one promoter operably linked to the third nucleotide sequence is a B8R promoter and a B19R promoter.
[1633] 126. The nucleic acid of embodiment 125, wherein the B8R promoter comprises the nucleotide sequence of SEQ ID NO: 564 and the B19R promoter comprises the nucleotide sequence of SEQ ID NO: 565.
[1634] 127. The nucleic acid of any one of embodiments 124-126, wherein the at least one promoter operatively linked to the first nucleotide sequence is an H5R early promoter or an H5R late promoter.
[1635] 128. The nucleic acid of embodiment 127, wherein the at least one promoter operatively linked to the first nucleotide sequence is an H5R early promoter and an H5R late promoter.
[1636] 129. The nucleic acid of embodiment 128, wherein the H5R early promoter comprises the nucleotide sequence of SEQ ID NO: 553 and the H5R late promoter comprises the nucleotide sequence of SEQ ID NO: 554.
[1637] 130. The nucleic acid of any one of embodiments 124-129, nucleotide sequence of the F17R promoter comprises the nucleotide sequence of SEQ ID NO: 563.
[1638] 131. A nucleic acid comprising a recombinant vaccinia virus genome, comprising:
   [1639] (a) a vaccinia virus nucleotide sequence of SEQ ID NO: 210, which comprises partial C2L, F3L, B14R, and B29R vaccinia genes and which comprises a deletion in the B8R gene;
   [1640] (b) a first transgene comprising a first nucleotide sequence encoding an antibody that specifically binds to CTLA-4, wherein the first nucleotide sequence is set forth in SEQ ID NO: 214, and wherein the first nucleotide sequence is in the same orientation as endogenous vaccinia virus genes that flank the first nucleotide sequence and the first transgene is present between the partial C2L and F3L vaccinia genes of the vaccinia virus nucleotide sequence of SEQ ID NO: 210;
   [1641] (c) a second transgene comprising a second nucleotide sequence encoding an IL-12 polypeptide, wherein the second nucleotide sequence is set forth in SEQ ID NO: 215, and wherein the second nucleotide sequence is in the same orientation as endogenous vaccinia virus genes that flank the second nucleotide sequence and the second transgene is present in the locus of the deletion in the B8R gene of the vaccinia virus nucleotide sequence of SEQ ID NO: 210; and
   [1642] (d) a third transgene comprising a third nucleotide sequence encoding FLT3L, wherein the third nucleotide sequence is set forth in SEQ ID NO: 216, wherein the third nucleotide sequence is in the same orientation as endogenous vaccinia virus genes that flank the third nucleotide sequence and the third transgene is present in the locus of the deletion in the B8R gene, of the vaccinia virus nucleotide sequence of SEQ ID NO: 210 and wherein the third transgene is downstream of the second transgene;
   [1643] wherein the nucleic acid further comprises:
   [1644] (i) a nucleotide sequence comprising at least one promoter operably linked to the first nucleotide sequence, wherein the at least one promoter operably linked to the first nucleotide sequence is an H5R promoter;
   [1645] (ii) a nucleotide sequence comprising at least one promoter operably linked to the second nucleotide sequence, wherein the at least one promoter operably linked to the second nucleotide sequence is an F17R promoter; and
   [1646] (iii) a nucleotide sequence comprising at least one promoter operably linked to the third nucleotide sequence, wherein the at least one promoter operably linked to the third nucleotide sequence is a B8R promoter or a B19R promoter.
[1647] 132. The nucleic acid of embodiment 131, wherein the at least one promoter operably linked to the third nucleotide sequence is a B8R promoter and a B19R promoter.
[1648] 133. The nucleic acid of embodiment 132, wherein the B8R promoter comprises the nucleotide sequence of SEQ ID NO: 564 and the B19R promoter comprises the nucleotide sequence of SEQ ID NO: 565.
[1649] 134. The nucleic acid of any one of embodiments 131-133, wherein the at least one promoter operatively linked to the first nucleotide sequence is an H5R early promoter or an H5R late promoter.
[1650] 135. The nucleic acid of embodiment 134, wherein the at least one promoter operatively linked to the first nucleotide sequence is an H5R early promoter and an H5R late promoter.
[1651] 136. The nucleic acid of embodiment 135, wherein the H5R early promoter comprises the nucleotide sequence of SEQ ID NO: 553 and the H5R late promoter comprises the nucleotide sequence of SEQ ID NO: 554.
[1652] 137. The nucleic acid of any one of embodiments 131-136, nucleotide sequence of the F17R promoter comprises the nucleotide sequence of SEQ ID NO: 563.
[1653] 138. A nucleic acid comprising a recombinant vaccinia virus genome, comprising:
   [1654] (a) a vaccinia virus nucleotide sequence of SEQ ID NO: 210, which comprises partial C2L, F3L, B14R, and B29R vaccinia genes and which comprises a deletion in the B8R gene;
   [1655] (b) a first transgene comprising a first nucleotide sequence encoding an antibody that specifically binds to CTLA-4, wherein the first nucleotide sequence is set forth in SEQ ID NO: 214, and wherein the first nucleotide sequence is in the same orientation as endogenous vaccinia virus genes that flank the first nucleotide sequence and the first transgene is present between the partial B14R and B29R vaccinia genes of the vaccinia virus nucleotide sequence of SEQ ID NO: 210;
   [1656] (c) a second transgene comprising a second nucleotide sequence encoding an IL-12 polypeptide, wherein the second nucleotide sequence is set forth in SEQ ID NO: 215, and wherein the second nucleotide sequence is in the same orientation as endogenous vaccinia virus genes that flank the second nucleotide sequence and the second transgene is present in the locus of the deletion in the B8R gene of the vaccinia virus nucleotide sequence of SEQ ID NO: 210; and
   [1657] (d) a third transgene comprising a third nucleotide sequence encoding FLT3L, wherein the third nucleotide sequence is set forth in SEQ ID NO: 216, wherein the third nucleotide sequence is in the same orientation as endogenous vaccinia virus genes that flank the third nucleotide sequence and the third transgene is present in the locus of the deletion in the B8R gene of the vaccinia virus nucleotide sequence of SEQ ID NO: 210, and wherein the third transgene is upstream of the second transgene;
   [1658] wherein the nucleic acid further comprises:
   [1659] (i) a nucleotide sequence comprising at least one promoter operably linked to the first nucleotide sequence, wherein the at least one promoter operably linked to the first nucleotide sequence is an H5R promoter;
   [1660] (ii) a nucleotide sequence comprising at least one promoter operably linked to the second nucleotide sequence, wherein the at least one promoter operably linked to the second nucleotide sequence is an F17R promoter; and
   [1661] (iii) a nucleotide sequence comprising at least one promoter operably linked to the third nucleotide sequence, wherein the at least one promoter operably linked to the third nucleotide sequence is a B8R promoter or a B19R promoter.
[1662] 139. The nucleic acid of embodiment 138, wherein the at least one promoter operably linked to the third nucleotide sequence is a B8R promoter and a B19R promoter.
[1663] 140. The nucleic acid of embodiment 139, wherein the B8R promoter comprises the nucleotide sequence of SEQ ID NO: 564 and the B19R promoter comprises the nucleotide sequence of SEQ ID NO: 565.
[1664] 141. The nucleic acid of any one of embodiments 138-140, wherein the at least one promoter operatively linked to the first nucleotide sequence is an H5R early promoter or an H5R late promoter.
[1665] 142. The nucleic acid of embodiment 141, wherein the at least one promoter operatively linked to the first nucleotide sequence is an H5R early promoter and an H5R late promoter.
[1666] 143. The nucleic acid of embodiment 142, wherein the H5R early promoter comprises the nucleotide sequence of SEQ ID NO: 553 and the H5R late promoter comprises the nucleotide sequence of SEQ ID NO: 554.
[1667] 144. The nucleic acid of any one of embodiments 138-143, nucleotide sequence of the F17R promoter comprises the nucleotide sequence of SEQ ID NO: 563.
[1668] 145. A nucleic acid comprising a recombinant vaccinia virus genome, comprising:
   [1669] (a) a vaccinia virus nucleotide sequence of SEQ ID NO: 210, which comprises partial C2L, F3L, B14R, and B29R vaccinia genes and which comprises a deletion in the B8R gene;
   [1670] (b) a first transgene comprising a first nucleotide sequence encoding an antibody that specifically binds to CTLA-4, wherein the first nucleotide sequence is set forth in SEQ ID NO: 214, and wherein the first nucleotide sequence is in the same orientation as endogenous vaccinia virus genes that flank the first nucleotide sequence and the first transgene is present between the partial B14R and B29R vaccinia genes of the vaccinia virus nucleotide sequence of SEQ ID NO: 210;
   [1671] (c) a second transgene comprising a second nucleotide sequence encoding an IL-12 polypeptide, wherein the second nucleotide sequence is set forth in SEQ ID NO: 215, and wherein the second nucleotide sequence is in the same orientation as endogenous vaccinia virus genes that flank the second nucleotide sequence and the second transgene is present in the locus of the deletion in the B8R gene of the vaccinia virus nucleotide sequence of SEQ ID NO: 210; and
   [1672] (d) a third transgene comprising a third nucleotide sequence encoding FLT3L, wherein the third nucleotide sequence is set forth in SEQ ID NO: 216, wherein the third nucleotide sequence is in the same orientation as endogenous vaccinia virus genes that flank the third nucleotide sequence and the third transgene is present in the locus of the deletion in the B8R gene of the vaccinia virus nucleotide sequence of SEQ ID NO: 210, and wherein the third transgene is downstream of the second transgene;
   [1673] wherein the nucleic acid further comprises:
   [1674] (i) a nucleotide sequence comprising at least one promoter operably linked to the first nucleotide sequence, wherein the at least one promoter operably linked to the first nucleotide sequence is an H5R promoter;
   [1675] (ii) a nucleotide sequence comprising at least one promoter operably linked to the second nucleotide sequence, wherein the at least one promoter operably linked to the second nucleotide sequence is an F17R promoter; and
   [1676] (iii) a nucleotide sequence comprising at least one promoter operably linked to the third nucleotide sequence, wherein the at least one promoter operably linked to the third nucleotide sequence is a B8R promoter and a B19R promoter.
[1677] 146. The nucleic acid of embodiment 145, wherein the at least one promoter operably linked to the third nucleotide sequence is a B8R promoter and a B19R promoter.
[1678] 147. The nucleic acid of embodiment 146, wherein the B8R promoter comprises the nucleotide sequence of SEQ ID NO: 564 and the B19R promoter comprises the nucleotide sequence of SEQ ID NO: 565.
[1679] 148. The nucleic acid of any one of embodiments 145-147, wherein the at least one promoter operatively linked to the first nucleotide sequence is an H5R early promoter or an H5R late promoter.
[1680] 149. The nucleic acid of embodiment 148, wherein the at least one promoter operatively linked to the first nucleotide sequence is an H5R early promoter and an H5R late promoter.
[1681] 150. The nucleic acid of embodiment 149, wherein the H5R early promoter comprises the nucleotide sequence of SEQ ID NO: 553 and the H5R late promoter comprises the nucleotide sequence of SEQ ID NO: 554.
[1682] 151. The nucleic acid of any one of embodiments 145-150, nucleotide sequence of the F17R promoter comprises the nucleotide sequence of SEQ ID NO: 563.
[1683] 152. A nucleic acid comprising a recombinant vaccinia virus genome, comprising:
   [1684] (a) a vaccinia virus nucleotide sequence of SEQ ID NO: 210, which comprises partial C2L, F3L, B14R, and B29R vaccinia genes and which comprises a deletion in the B8R gene;
   [1685] (b) a first transgene comprising a first nucleotide sequence encoding an antibody that specifically binds to CTLA-4, wherein the first nucleotide sequence is set forth in SEQ ID NO: 214, and wherein the first nucleotide sequence is in the same orientation as endogenous vaccinia virus genes that flank the first nucleotide sequence and the first transgene is present between the partial C2L and F3L vaccinia genes of the vaccinia virus nucleotide sequence of SEQ ID NO: 210;
   [1686] (c) a second transgene comprising a second nucleotide sequence encoding an IL-12 polypeptide, wherein the second nucleotide sequence is set forth in SEQ ID NO: 215, and wherein the second nucleotide sequence is in the same orientation as endogenous vaccinia virus genes that flank the second nucleotide sequence and the second transgene is present in the locus of the deletion in the B8R gene of the vaccinia virus nucleotide sequence of SEQ ID NO: 210; and
   [1687] (d) a third transgene comprising a third nucleotide sequence encoding FLT3L, wherein the third nucleotide sequence is set forth in SEQ ID NO: 216, wherein the third nucleotide sequence is in the same orientation as endogenous vaccinia virus genes that flank the third nucleotide sequence and the third transgene is present in the locus of the deletion in the B8R gene of the vaccinia virus nucleotide sequence of SEQ ID NO: 210, and wherein the third transgene is upstream of the second transgene;
   [1688] wherein the nucleic acid further comprises:
   [1689] (i) a nucleotide sequence comprising at least one promoter operably linked to the first nucleotide sequence, wherein the at least one promoter operably linked to the first nucleotide sequence is an H5R promoter;
   [1690] (ii) a nucleotide sequence comprising at least one promoter operably linked to the second nucleotide sequence, wherein the at least one promoter operably linked to the second nucleotide sequence is a late promoter that comprises the nucleotide sequence of SEQ ID NO: 561; and
   [1691] (iii) a nucleotide sequence comprising at least one promoter operably linked to the third nucleotide sequence, wherein the at least one promoter operably linked to the third nucleotide sequence is a E3L promoter. 0

[1692] 153. The nucleic acid of embodiment 152, wherein the at least one promoter operatively linked to the first nucleotide sequence is an H5R early promoter or an H5R late promoter.
[1693] 154. The nucleic acid of embodiment 153, wherein the at least one promoter operatively linked to the first nucleotide sequence is an H5R early promoter and an H5R late promoter.
[1694] 155. The nucleic acid of embodiment 154, wherein the H5R early promoter comprises the nucleotide sequence of SEQ ID NO: 553 and the H5R late promoter comprises the nucleotide sequence of SEQ ID NO: 554.
[1695] 156. The nucleic acid of any one of embodiments 152-155, nucleotide sequence of the E3L promoter comprises the nucleotide sequence of SEQ ID NO: 567.
[1696] 157. A nucleic acid comprising a recombinant vaccinia virus genome, comprising:
   [1697] (a) a vaccinia virus nucleotide sequence of SEQ ID NO: 210, which comprises partial C2L, F3L, B14R, and B29R vaccinia genes and which comprises a deletion in the B8R gene;
   [1698] (b) a first transgene comprising a first nucleotide sequence encoding an antibody that specifically binds to CTLA-4, wherein the first nucleotide sequence is set forth in SEQ ID NO: 214, and wherein the first nucleotide sequence is in the same orientation as endogenous vaccinia virus genes that flank the first nucleotide sequence and the first transgene is present between the partial C2L and F3L vaccinia genes of the vaccinia virus nucleotide sequence of SEQ ID NO: 210;
   [1699] (c) a second transgene comprising a second nucleotide sequence encoding an IL-12 polypeptide, wherein the second nucleotide sequence is set forth in SEQ ID NO: 215, and wherein the second nucleotide sequence is in the same orientation as endogenous vaccinia virus genes that flank the second nucleotide sequence and the second transgene is present in the locus of the deletion in the B8R gene of the vaccinia virus nucleotide sequence of SEQ ID NO: 210; and
   [1700] (d) a third transgene comprising a third nucleotide sequence encoding FLT3L, wherein the third nucleotide sequence is set forth in SEQ ID NO: 216, wherein the third nucleotide sequence is in the same orientation as endogenous vaccinia virus genes that flank the third nucleotide sequence and the third transgene is present in the locus of the deletion in the B8R gene of the vaccinia virus nucleotide sequence of SEQ ID NO: 210, and wherein the third transgene is downstream of the second transgene;
   [1701] wherein the nucleic acid further comprises:
   [1702] (i) a nucleotide sequence comprising at least one promoter operably linked to the first nucleotide sequence, wherein the at least one promoter operably linked to the first nucleotide sequence is an H5R promoter;
   [1703] (ii) a nucleotide sequence comprising at least one promoter operably linked to the second nucleotide sequence, wherein the at least one promoter operably linked to the second nucleotide sequence is a late promoter that comprises the nucleotide sequence of SEQ ID NO: 561; and
   [1704] (iii) a nucleotide sequence comprising at least one promoter operably linked to the third nucleotide sequence, wherein the at least one promoter operably linked to the third nucleotide sequence is a E3L promoter.
[1705] 158. The nucleic acid of embodiment 157, wherein the at least one promoter operatively linked to the first nucleotide sequence is an H5R early promoter or an H5R late promoter.
[1706] 159. The nucleic acid of embodiment 158, wherein the at least one promoter operatively linked to the first nucleotide sequence is an H5R early promoter and an H5R late promoter.
[1707] 160. The nucleic acid of embodiment 159, wherein the H5R early promoter comprises the nucleotide sequence of SEQ ID NO: 553 and the H5R late promoter comprises the nucleotide sequence of SEQ ID NO: 554.
[1708] 161. The nucleic acid of any one of embodiments 157-160, nucleotide sequence of the E3L promoter comprises the nucleotide sequence of SEQ ID NO: 567.
[1709] 162. A nucleic acid comprising a recombinant vaccinia virus genome, comprising:
   [1710] (a) a vaccinia virus nucleotide sequence of SEQ ID NO: 210, which comprises partial C2L, F3L, B14R, and B29R vaccinia genes and which comprises a deletion in the B8R gene;
   [1711] (b) a first transgene comprising a first nucleotide sequence encoding an antibody that specifically binds to CTLA-4, wherein the first nucleotide sequence is set forth in SEQ ID NO: 214, and wherein the first nucleotide sequence is in the same orientation as endogenous vaccinia virus genes that flank the first nucleotide sequence and the first transgene is present between the partial B14R and B29R vaccinia genes of the vaccinia virus nucleotide sequence of SEQ ID NO: 210;
   [1712] (c) a second transgene comprising a second nucleotide sequence encoding an IL-12 polypeptide, wherein the second nucleotide sequence is set forth in SEQ ID NO: 215, and wherein the second nucleotide sequence is in the same orientation as endogenous vaccinia virus genes that flank the second nucleotide sequence and the second transgene is present in the locus of the deletion in the B8R gene of the vaccinia virus nucleotide sequence of SEQ ID NO: 210; and
   [1713] (d) a third transgene comprising a third nucleotide sequence encoding FLT3L, wherein the third nucleotide sequence is set forth in SEQ ID NO: 216, wherein the third nucleotide sequence is in the same orientation as endogenous vaccinia virus genes that flank the third nucleotide sequence and the third transgene is present in the locus of the deletion in the B8R gene of the vaccinia virus nucleotide sequence of SEQ ID NO: 210, and wherein the third transgene is upstream of the second transgene;
   [1714] wherein the nucleic acid further comprises:
   [1715] (i) a nucleotide sequence comprising at least one promoter operably linked to the first nucleotide sequence, wherein the at least one promoter operably linked to the first nucleotide sequence is an H5R promoter;
   [1716] (ii) a nucleotide sequence comprising at least one promoter operably linked to the second nucleotide sequence, wherein the at least one promoter operably linked to the second nucleotide sequence is a late promoter that comprises the nucleotide sequence of SEQ ID NO: 561; and
   [1717] (iii) a nucleotide sequence comprising at least one promoter operably linked to the third nucleotide sequence, wherein the at least one promoter operably linked to the third nucleotide sequence is a E3L promoter.
[1718] 163. The nucleic acid of embodiment 162, wherein the at least one promoter operatively linked to the first nucleotide sequence is an H5R early promoter or an H5R late promoter.
[1719] 164. The nucleic acid of embodiment 163, wherein the at least one promoter operatively linked to the first nucleotide sequence is an H5R early promoter and an H5R late promoter.
[1720] 165. The nucleic acid of embodiment 164, wherein the H5R early promoter comprises the nucleotide sequence of SEQ ID NO: 553 and the H5R late promoter comprises the nucleotide sequence of SEQ ID NO: 554.
[1721] 166. The nucleic acid of any one of embodiments 162-165, nucleotide sequence of the E3L promoter comprises the nucleotide sequence of SEQ ID NO: 567.
[1722] 167. A nucleic acid comprising a recombinant vaccinia virus genome, comprising:
   [1723] (a) a vaccinia virus nucleotide sequence of SEQ ID NO: 210, which comprises partial C2L, F3L, B14R, and B29R vaccinia genes and which comprises a deletion in the B8R gene;
   [1724] (b) a first transgene comprising a first nucleotide sequence encoding an antibody that specifically binds to CTLA-4, wherein the first nucleotide sequence is set forth in SEQ ID NO: 214, and wherein the first nucleotide sequence is in the same orientation as endogenous vaccinia virus genes that flank the first nucleotide sequence and the first transgene is present between the partial B14R and B29R vaccinia genes of the vaccinia virus nucleotide sequence of SEQ ID NO: 210;
   [1725] (c) a second transgene comprising a second nucleotide sequence encoding an IL-12 polypeptide, wherein the second nucleotide sequence is set forth in SEQ ID NO: 215, and wherein the second nucleotide sequence is in the same orientation as endogenous vaccinia virus genes that flank the second nucleotide sequence and the second transgene is present in the locus of the deletion in the B8R gene of the vaccinia virus nucleotide sequence of SEQ ID NO: 210; and
   [1726] (d) a third transgene comprising a third nucleotide sequence encoding FLT3L, wherein the third nucleotide sequence is set forth in SEQ ID NO: 216, wherein the third nucleotide sequence is in the same orientation as endogenous vaccinia virus genes that flank the third nucleotide sequence and the third transgene is present in the locus of the deletion in the B8R gene of the vaccinia virus nucleotide sequence of SEQ ID NO: 210, and wherein the third transgene is downstream of the second transgene; 1

[1727] wherein the nucleic acid further comprises:
[1728] (i) a nucleotide sequence comprising at least one promoter operably linked to the first nucleotide sequence, wherein the at least one promoter operably linked to the first nucleotide sequence is an H5R promoter;
[1729] (ii) a nucleotide sequence comprising at least one promoter operably linked to the second nucleotide sequence, wherein the at least one promoter operably linked to the second nucleotide sequence is a late promoter that comprises the nucleotide sequence of SEQ ID NO: 561; and
[1730] (iii) a nucleotide sequence comprising at least one promoter operably linked to the third nucleotide sequence, wherein the at least one promoter operably linked to the third nucleotide sequence is a E3L promoter.
[1731] 168. The nucleic acid of embodiment 167, wherein the at least one promoter operatively linked to the first nucleotide sequence is an H5R early promoter or an H5R late promoter.
[1732] 169. The nucleic acid of embodiment 168, wherein the at least one promoter operatively linked to the first nucleotide sequence is an H5R early promoter and an H5R late promoter.
[1733] 170. The nucleic acid of embodiment 169, wherein the H5R early promoter comprises the nucleotide sequence of SEQ ID NO: 553 and the H5R late promoter comprises the nucleotide sequence of SEQ ID NO: 554.
[1734] 171. The nucleic acid of any one of embodiments 167-170, nucleotide sequence of the E3L promoter comprises the nucleotide sequence of SEQ ID NO: 567.
[1735] 172. A nucleic acid comprising a recombinant vaccinia virus genome, comprising:
   [1736] (a) a vaccinia virus nucleotide sequence of SEQ ID NO: 210, which comprises partial C2L, F3L, B14R, and B29R vaccinia genes and which comprises a deletion in the B8R gene;
   [1737] (b) a first transgene comprising a first nucleotide sequence encoding an antibody that specifically binds to CTLA-4, wherein the first nucleotide sequence is set forth in SEQ ID NO: 214, and wherein the first nucleotide sequence is in the same orientation as endogenous vaccinia virus genes that flank the first nucleotide sequence and the first transgene is present between the partial C2L and F3L vaccinia genes of the vaccinia virus nucleotide sequence of SEQ ID NO: 210;
   [1738] (c) a second transgene comprising a second nucleotide sequence encoding an IL-12 polypeptide, wherein the second nucleotide sequence is set forth in SEQ ID NO: 215, and wherein the second nucleotide sequence is in the same orientation as endogenous vaccinia virus genes that flank the second nucleotide sequence and the second transgene is present in the locus of the deletion in the B8R gene of the vaccinia virus nucleotide sequence of SEQ ID NO: 210; and
   [1739] (d) a third transgene comprising a third nucleotide sequence encoding FLT3L, wherein the third nucleotide sequence is set forth in SEQ ID NO: 216, wherein the third nucleotide sequence is in the same orientation as endogenous vaccinia virus genes that flank the third nucleotide sequence and the third transgene is present in the locus of the deletion in the B8R gene of the vaccinia virus nucleotide sequence of SEQ ID NO: 210, and wherein the third transgene is upstream of the second transgene;
   [1740] wherein the nucleic acid further comprises:
   [1741] (i) a nucleotide sequence comprising at least one promoter operably linked to the first nucleotide sequence, wherein the at least one promoter operably linked to the first nucleotide sequence is a pS promoter;
   [1742] (ii) a nucleotide sequence comprising at least one promoter operably linked to the second nucleotide sequence, wherein the at least one promoter operably linked to the second nucleotide sequence an F17R promoter; and
   [1743] (iii) a nucleotide sequence comprising at least one promoter operably linked to the third nucleotide sequence, wherein the at least one promoter operably linked to the third nucleotide sequence is a E3L promoter.
[1744] 173. The nucleic acid of embodiment 172, wherein the nucleotide sequence of the pS promoter comprises the nucleotide sequence of SEQ ID NO: 555, SEQ ID NO: 556, or SEQ ID NO: 557.
[1745] 174. The nucleic acid of embodiment 172 or 173, wherein the nucleotide sequence of the F17R promoter comprises the nucleotide sequence of SEQ ID NO: 563.
[1746] 175. The nucleic acid of any one of embodiments 172-174, wherein the nucleotide sequence of the E3L promoter comprises the nucleotide sequence of SEQ ID NO: 567.
[1747] 176. A nucleic acid comprising a recombinant vaccinia virus genome, comprising:
   [1748] (a) a vaccinia virus nucleotide sequence of SEQ ID NO: 210, which comprises partial C2L, F3L, B14R, and B29R vaccinia genes and which comprises a deletion in the B8R gene;
   [1749] (b) a first transgene comprising a first nucleotide sequence encoding an antibody that specifically binds to CTLA-4, wherein the first nucleotide sequence is set forth in SEQ ID NO: 214, and wherein the first nucleotide sequence is in the same orientation as endogenous vaccinia virus genes that flank the first nucleotide sequence and the first transgene is present between the partial C2L and F3L vaccinia genes of the vaccinia virus nucleotide sequence of SEQ ID NO: 210;
   [1750] (c) a second transgene comprising a second nucleotide sequence encoding an IL-12 polypeptide, wherein the second nucleotide sequence is set forth in SEQ ID NO: 215, and wherein the second nucleotide sequence is in the same orientation as endogenous vaccinia virus genes that flank the second nucleotide sequence and the second transgene is present in the locus of the deletion in the B8R gene of the vaccinia virus nucleotide sequence of SEQ ID NO: 210; and
   [1751] (d) a third transgene comprising a third nucleotide sequence encoding FLT3L, wherein the third nucleotide sequence is set forth in SEQ ID NO: 216, wherein the third nucleotide sequence is in the same orientation as endogenous vaccinia virus genes that flank the third nucleotide sequence and the third transgene is present in the locus of the deletion in the B8R gene of the vaccinia virus nucleotide sequence of SEQ ID NO: 210, and wherein the third transgene is downstream of the second transgene;
   [1752] wherein the nucleic acid further comprises:
   [1753] (i) a nucleotide sequence comprising at least one promoter operably linked to the first nucleotide sequence, wherein the at least one promoter operably linked to the first nucleotide sequence is a pS promoter;
   [1754] (ii) a nucleotide sequence comprising at least one promoter operably linked to the second nucleotide sequence, wherein the at least one promoter operably linked to the second nucleotide sequence is an F17R promoter; and
   [1755] (iii) a nucleotide sequence comprising at least one promoter operably linked to the third nucleotide sequence, wherein the at least one promoter operably linked to the third nucleotide sequence is a E3L promoter.
[1756] 177. The nucleic acid of embodiment 176, wherein the nucleotide sequence of the pS promoter comprises the nucleotide sequence of SEQ ID NO: 555, SEQ ID NO: 556, or SEQ ID NO: 557.
[1757] 178. The nucleic acid of embodiment 176 or 177, wherein the nucleotide sequence of the F17R promoter comprises the nucleotide sequence of SEQ ID NO: 563.
[1758] 179. The nucleic acid of any one of embodiments 176-178, wherein the nucleotide sequence of the E3L promoter comprises the nucleotide sequence of SEQ ID NO: 567.
[1759] 180. A nucleic acid comprising a recombinant vaccinia virus genome, comprising:
[1760] (a) a vaccinia virus nucleotide sequence of SEQ ID NO: 210, which comprises partial C2L, F3L, B14R, and B29R vaccinia genes and which comprises a deletion in the B8R gene;
[1761] (b) a first transgene comprising a first nucleotide sequence encoding an antibody that specifically binds to CTLA-4, wherein the first nucleotide sequence is set forth in SEQ ID NO: 214, and wherein the first nucleotide sequence is in the same orientation as endogenous vaccinia virus genes that flank the first nucleotide sequence and the first transgene is present between the partial B14R and B29R vaccinia genes of the vaccinia virus nucleotide sequence of SEQ ID NO: 210;
[1762] (c) a second transgene comprising a second nucleotide sequence encoding an IL-12 polypeptide, wherein the second nucleotide sequence is set forth in SEQ ID NO: 215, and wherein the second nucleotide sequence is in the same orientation as endogenous vaccinia virus genes that flank the second nucleotide sequence and the second transgene is present in the locus of the deletion in the B8R gene of the vaccinia virus nucleotide sequence of SEQ ID NO: 210; and
[1763] (d) a third transgene comprising a third nucleotide sequence encoding FLT3L, wherein the third nucleotide sequence is set forth in SEQ ID NO: 216, wherein the third nucleotide sequence is in the same orientation as endogenous vaccinia virus genes that flank the third nucleotide sequence and the third transgene is present in the locus of the deletion in the B8R gene of the vaccinia virus nucleotide sequence of SEQ ID NO: 210, and wherein the third transgene is upstream of the second transgene;
[1764] wherein the nucleic acid further comprises:
[1765] (i) a nucleotide sequence comprising at least one promoter operably linked to the first nucleotide sequence, wherein the at least one promoter operably linked to the first nucleotide sequence is a pS promoter;
[1766] (ii) a nucleotide sequence comprising at least one promoter operably linked to the second nucleotide sequence, wherein the at least one promoter operably linked to the second nucleotide sequence is an F17R promoter; and
[1767] (iii) a nucleotide sequence comprising at least one promoter operably linked to the third nucleotide sequence, wherein the at least one promoter operably linked to the third nucleotide sequence is a E3L promoter.
[1768] 181. The nucleic acid of embodiment 180, wherein the nucleotide sequence of the pS promoter comprises the nucleotide sequence of SEQ ID NO: 555, SEQ ID NO: 556, or SEQ ID NO: 557.
[1769] 182. The nucleic acid of embodiment 170 or 181, wherein the nucleotide sequence of the F17R promoter comprises the nucleotide sequence of SEQ ID NO: 563.
[1770] 183. The nucleic acid of any one of embodiments 180-182, wherein the nucleotide sequence of the E3L promoter comprises the nucleotide sequence of SEQ ID NO: 567.
[1771] 184. A nucleic acid comprising a recombinant vaccinia virus genome, comprising:
   [1772] (a) a vaccinia virus nucleotide sequence of SEQ ID NO: 210, which comprises partial C2L, F3L, B14R, and B29R vaccinia genes and which comprises a deletion in the B8R gene;
   [1773] (b) a first transgene comprising a first nucleotide sequence encoding an antibody that specifically binds to CTLA-4, wherein the first nucleotide sequence is set forth in SEQ ID NO: 214, and wherein the first nucleotide sequence is in the same orientation as endogenous vaccinia virus genes that flank the first nucleotide sequence and the first transgene is present between the partial B14R and B29R vaccinia genes of the vaccinia virus nucleotide sequence of SEQ ID NO: 210;
   [1774] (c) a second transgene comprising a second nucleotide sequence encoding an IL-12 polypeptide, wherein the second nucleotide sequence is set forth in SEQ ID NO: 215, and wherein the second nucleotide sequence is in the same orientation as endogenous vaccinia virus genes that flank the second nucleotide sequence and the second transgene is present in the locus of the deletion in the B8R gene of the vaccinia virus nucleotide sequence of SEQ ID NO: 210; and
   [1775] (d) a third transgene comprising a third nucleotide sequence encoding FLT3L, wherein the third nucleotide sequence is set forth in SEQ ID NO: 216, wherein the third nucleotide sequence is in the same orientation as endogenous vaccinia virus genes that flank the third nucleotide sequence and the third transgene is present in the locus of the deletion in the B8R gene of the vaccinia virus nucleotide sequence of SEQ ID NO: 210, and wherein the third transgene is downstream of the second transgene;
   [1776] wherein the nucleic acid further comprises:
   [1777] (i) a nucleotide sequence comprising at least one promoter operably linked to the first nucleotide sequence, wherein the at least one promoter operably linked to the first nucleotide sequence is a pS promoter;
   [1778] (ii) a nucleotide sequence comprising at least one promoter operably linked to the second nucleotide sequence, wherein the at least one promoter operably linked to the second nucleotide sequence is an F17R promoter; and
   [1779] (iii) a nucleotide sequence comprising at least one promoter operably linked to the third nucleotide sequence, wherein the at least one promoter operably linked to the third nucleotide sequence is a E3L promoter.
[1780] 185. The nucleic acid of embodiment 184, wherein the nucleotide sequence of the pS promoter comprises the nucleotide sequence of SEQ ID NO: 555, SEQ ID NO: 556, or SEQ ID NO: 557.
[1781] 186. The nucleic acid of embodiment 174 or 185, wherein the nucleotide sequence of the F17R promoter comprises the nucleotide sequence of SEQ ID NO: 563.
[1782] 187. The nucleic acid of any one of embodiments 184-186, wherein the nucleotide sequence of the E3L promoter comprises the nucleotide sequence of SEQ ID NO: 567.
[1783] 188. A virus comprising the nucleic acid comprising a recombinant vaccinia virus genome of any one of embodiments 1-187.
[1784] 189. A packaging cell line comprising the nucleic acid of any one of embodiments 1-187.
[1785] 190. A packaging cell line comprising the virus of embodiment 188.
[1786] 191. A pharmaceutical composition comprising the virus of embodiment 188 and a physiologically acceptable carrier.
[1787] 192. A kit comprising the nucleic acid of any one of embodiments 1-187 and a package insert instructing a user of the kit to express the nucleic acid in a host cell.
[1788] 193. A kit comprising the virus of embodiment 188 and a package insert instructing a user of the kit to express the virus in a host cell.
[1789] 194. A kit comprising the virus of embodiment 188 and a package insert instructing a user to administer a therapeutically effective amount of the virus to a mammalian patient having cancer, thereby treating the cancer.
[1790] 195. The kit of embodiment 194, wherein the mammalian patient is a human patient.
[1791] 196. A method of treating cancer in a mammalian patient, the method comprising administering to the mammalian patient a therapeutically effective amount of the virus of embodiment 188.
[1792] 197. A method of treating cancer in a mammalian patient, the method comprising administering to the mammalian patient a therapeutically effective amount of the pharmaceutical composition of embodiment 191.
[1793] 198. The method of embodiment 196 or 197, wherein the mammalian patient is a human patient.
[1794] 199. The method of any one of embodiments 196-198, wherein the cancer is selected from the group consisting of leukemia, lymphoma, liver cancer, bone cancer, lung cancer, brain cancer, bladder cancer, gastrointestinal cancer, breast cancer, cardiac cancer, cervical cancer, uterine cancer, head and neck cancer, gallbladder cancer, laryngeal cancer, lip and oral cavity cancer, ocular cancer, melanoma, pancreatic cancer, prostate cancer, colorectal cancer, testicular cancer, and throat cancer.
[1795] 200. The method of embodiment 199, wherein the method further comprises administering to the mammalian patient an anti-PD1 antibody or an anti-PD-L1 antibody.

### 5.7.5. Set 5

[1796] 1. A nucleic acid comprising a recombinant vaccinia virus genome, comprising:
   [1797] (a) deletions in the following genes: C2L, C1L, N1L, N2L, M1L, M2L, K1L, K2L, K3L, K4L, K5L, K6L, K7R, F1L, F2L, F3L, B8R, B14R, B15R, B16R, B17L, B18R, B 19R, and B20R;
   [1798] (b) deletions in the following genes in the 3′ inverted terminal repeat (ITR): B21R, B22R, B23R, B24R, B25R, B26R, B27R, B28R, and B29R; and
   [1799] (c) a first transgene comprising a first nucleotide sequence encoding an antibody or antigen-binding fragment thereof that specifically binds to Cytotoxic T-lymphocyte Associated Protein 4 (CTLA-4);
   [1800] wherein the deletions in the C2L, F3L, B14R, and B29R vaccinia genes are partial deletions.
[1801] 2. The nucleic acid of embodiment 1, further comprising a nucleotide sequence comprising at least one promoter operably linked to the first nucleotide sequence.
[1802] 3. The nucleic acid of embodiment 2, wherein the at least one promoter operably linked to the first nucleotide sequence is an H5R promoter, a pS promoter, or a LEO promoter.
[1803] 4. The nucleic acid of embodiment 2, wherein the at least one promoter operably linked to the first nucleotide sequence is an H5R promoter.
[1804] 5. A nucleic acid comprising a recombinant vaccinia virus genome, comprising:
   [1805] (a) deletions in the following genes: C2L, C1L, N1L, N2L, M1L, M2L, K1L, K2L, K3L, K4L, K5L, K6L, K7R, F1L, F2L, F3L, B14R, B15R, B16R, B17L, B18R, B19R, and B20R, and optionally a deletion in the B8R gene;
   [1806] (b) deletions in the following genes in the 3′ ITR: B21R, B22R, B23R, B24R, B25R, B26R, B27R, B28R, and B29R;
   [1807] (c) a first transgene comprising a first nucleotide sequence encoding an antibody or antigen-binding fragment thereof that specifically binds to CTLA-4; and
   [1808] (d) a nucleotide sequence comprising at least one promoter operably linked to the first nucleotide sequence, wherein the at least one promoter operably linked to the first nucleotide sequence is an H5R promoter, a pS promoter, or a LEO promoter;
   [1809] wherein the deletions in the C2L, F3L, B14R, and B29R vaccinia genes are partial deletions.
[1810] 6. The nucleic acid of embodiment 5, wherein the at least one promoter operably linked to the first nucleotide sequence is an H5R promoter.
[1811] 7. The nucleic acid of any one of embodiments 1-6, wherein the first nucleotide sequence is in the same orientation as endogenous vaccinia virus genes that flank the first nucleotide sequence.
[1812] 8. The nucleic acid of any one of embodiments 1-7, wherein the first nucleotide sequence encodes an amino acid sequence comprising the amino acid sequence set forth in SEQ ID NO: 211.
[1813] 9. The nucleic acid of any one of embodiments 1-8, wherein the first nucleotide sequence comprises the sequence set forth in SEQ ID NO: 214.
[1814] 10. The nucleic acid of any one of embodiments 1-8, wherein the first nucleotide sequence is set forth in SEQ ID NO: 214.
[1815] 11. A nucleic acid comprising a recombinant vaccinia virus genome, comprising:
   [1816] (a) deletions in the following genes: C2L, C1L, N1L, N2L, M1L, M2L, K1L, K2L, K3L, K4L, K5L, K6L, K7R, F1L, F2L, F3L, B8R, B14R, B15R, B16R, B17L, B18R, B 19R, and B20R;
   [1817] (b) deletions in the following genes in the 3′ ITR: B21R, B22R, B23R, B24R, B25R, B26R, B27R, B28R, and B29R; and
   [1818] (c) a second transgene comprising a second nucleotide sequence encoding an Interleukin 12 (IL-12) polypeptide;
   [1819] wherein the deletions in the C2L, F3L, B14R, and B29R vaccinia genes are partial deletions.
[1820] 12. The nucleic acid of embodiment 11, further comprising a nucleotide sequence comprising at least one promoter operably linked to the second nucleotide sequence.
[1821] 13. The nucleic acid of embodiment 12, wherein the at least one promoter operably linked to the second nucleotide sequence is a late promoter.
[1822] 14. The nucleic acid of embodiment 13, wherein the late promoter comprises the nucleotide sequence of SEQ ID NO: 561, an F17R promoter, or a D13L promoter.
[1823] 15. The nucleic acid of embodiment 13, wherein the late promoter comprises the nucleotide sequence of SEQ ID NO: 561.
[1824] 16. A nucleic acid comprising a recombinant vaccinia virus genome, comprising:
   [1825] (a) deletions in the following genes: C2L, C1L, N1L, N2L, M1L, M2L, K1L, K2L, K3L, K4L, K5L, K6L, K7R, F1L, F2L, F3L, B14R, B15R, B16R, B17L, B18R, B19R, and B20R, and optionally a deletion in the B8R gene;
   [1826] (b) deletions in the following genes in the 3′ ITR: B21R, B22R, B23R, B24R, B25R, B26R, B27R, B28R, and B29R;
   [1827] (c) a second transgene comprising a second nucleotide sequence encoding an IL-12 polypeptide; and
   [1828] (d) a nucleotide sequence comprising at least one promoter operably linked to the second nucleotide sequence, wherein the at least one promoter operably linked to the second nucleotide sequence is a late promoter;
   [1829] wherein the deletions in the C2L, F3L, B14R, and B29R vaccinia genes are partial deletions.
[1830] 17. The nucleic acid of embodiment 16, wherein the late promoter comprises the nucleotide sequence of SEQ ID NO: 561, an F17R promoter, or a D13L promoter.
[1831] 18. The nucleic acid of embodiment 16, wherein the late promoter comprises the nucleotide sequence of SEQ ID NO: 561.
[1832] 19. The nucleic acid of any one of embodiments 11-18, wherein the second nucleotide sequence is in the same orientation as endogenous vaccinia virus genes that flank the second nucleotide sequence.
[1833] 20. The nucleic acid of any one of embodiments 11-19, wherein the IL-12 polypeptide is membrane-bound.
[1834] 21. The nucleic acid of any one of embodiments 11-20, wherein the IL-12 polypeptide comprises IL-12 p35 or IL-12 p70.
[1835] 22. The nucleic acid of any one of embodiments 11-21, wherein the IL-12 polypeptide comprises the amino acid sequence set forth in SEQ ID NO: 212.
[1836] 23. The nucleic acid of any one of embodiments 11-22, wherein the second nucleotide sequence comprises the sequence set forth in SEQ ID NO: 215.
[1837] 24. The nucleic acid of any one of embodiments 11-22, wherein the second nucleotide sequence is set forth in SEQ ID NO: 215.
[1838] 25. A nucleic acid comprising a recombinant vaccinia virus genome, comprising:
   [1839] (a) deletions in the following genes: C2L, C1L, N1L, N2L, M1L, M2L, K1L, K2L, K3L, K4L, K5L, K6L, K7R, F1L, F2L, F3L, B8R, B14R, B15R, B16R, B17L, B18R, B 19R, and B20R;
   [1840] (b) deletions in the following genes in the 3′ ITR: B21R, B22R, B23R, B24R, B25R, B26R, B27R, B28R, and B29R; and
   [1841] (c) a third transgene comprising a third nucleotide sequence encoding FMS-like tyrosine kinase 3 ligand (FLT3L);
   [1842] wherein the deletions in the C2L, F3L, B14R, and B29R vaccinia genes are partial deletions.
[1843] 26. The nucleic acid of embodiment 25, further comprising a nucleotide sequence comprising at least one promoter operably linked to the third nucleotide sequence.
[1844] 27. The nucleic acid of embodiment 26, wherein the at least one promoter operably linked to the third nucleotide sequence is a B8R promoter, a B19R promoter, a E3L promoter, an F11L promoter, or a B2R promoter.
[1845] 28. The nucleic acid of embodiment 26, wherein the at least one promoter operably linked to the third nucleotide sequence is a B8R promoter.
[1846] 29. The nucleic acid of embodiment 26, wherein the at least one promoter operably linked to the third nucleotide sequence is a B19R promoter.
[1847] 30. The nucleic acid of embodiment 26, wherein the at least one promoter operably linked to the third nucleotide sequence is a B8R promoter and a B19R promoter.
[1848] 31. A nucleic acid comprising a recombinant vaccinia virus genome, comprising:
   [1849] (a) deletions in the following genes: C2L, C1L, N1L, N2L, M1L, M2L, K1L, K2L, K3L, K4L, K5L, K6L, K7R, F1L, F2L, F3L, B14R, B15R, B16R, B17L, B18R, B19R, and B20R, and optionally a deletion in the B8R gene;
   [1850] (b) deletions in the following genes in the 3′ ITR: B21R, B22R, B23R, B24R, B25R, B26R, B27R, B28R, and B29R;
   [1851] (c) a third transgene comprising a third nucleotide sequence encoding FLT3L; and
   [1852] (d) a nucleotide sequence comprising at least one promoter operably linked to the third nucleotide sequence, wherein the at least one promoter operably linked to the third nucleotide sequence is a B8R promoter, a B19R promoter, a E3L promoter, an F11L promoter, or a B2R promoter;
   [1853] wherein the deletions in the C2L, F3L, B14R, and B29R vaccinia genes are partial deletions.
[1854] 32. The nucleic acid of embodiment 31, wherein the at least one promoter operably linked to the third nucleotide sequence is a B8R promoter.
[1855] 33. The nucleic acid of embodiment 31, wherein the at least one promoter operably linked to the third nucleotide sequence is a B19R promoter.
[1856] 34. The nucleic acid of embodiment 31, wherein the at least one promoter operably linked to the third nucleotide sequence is a B8R promoter and a B19R promoter.
[1857] 35. The nucleic acid of any one of embodiments 25-34, wherein the third nucleotide sequence is the same orientation as endogenous vaccinia virus genes that flank the third nucleotide sequence.
[1858] 36. The nucleic acid of any one of embodiments 25-35, wherein the FLT3L comprises the amino acid sequence set forth in SEQ ID NO: 213.
[1859] 37. The nucleic acid of any one of embodiments 25-36, wherein the third nucleotide sequence comprises the sequence set forth in SEQ ID NO: 216.
[1860] 38. The nucleic acid of any one of embodiments 25-36, wherein the third nucleotide sequence is set forth in SEQ ID NO: 216.
[1861] 39. A nucleic acid comprising a recombinant vaccinia virus genome, comprising:
   [1862] (a) deletions in the following genes: C2L, C1L, N1L, N2L, M1L, M2L, K1L, K2L, K3L, K4L, K5L, K6L, K7R, F1L, F2L, F3L, B8R, B14R, B15R, B16R, B17L, B18R, B 19R, and B20R;
   [1863] (b) deletions in the following genes in the 3′ ITR: B21R, B22R, B23R, B24R, B25R, B26R, B27R, B28R, and B29R;
   [1864] (c) a first transgene comprising a first nucleotide sequence encoding an antibody or antigen-binding fragment thereof that specifically binds to CTLA-4; and
   [1865] (d) a second transgene comprising a second nucleotide sequence encoding an IL-12 polypeptide;
   [1866] wherein the deletions in the C2L, F3L, B14R, and B29R vaccinia genes are partial deletions.
[1867] 40. The nucleic acid of embodiment 39, further comprising a nucleotide sequence comprising at least one promoter operably linked to the first nucleotide sequence.
[1868] 41. The nucleic acid of embodiment 40, wherein the at least one promoter operably linked to the first nucleotide sequence is an H5R promoter, a pS promoter, or a LEO promoter.
[1869] 42. The nucleic acid of embodiment 40, wherein the at least one promoter operably linked to the first nucleotide sequence is an H5R promoter.
[1870] 43. The nucleic acid of any one of embodiments 39-42, further comprising a nucleotide sequence comprising at least one promoter operably linked to the second nucleotide sequence.
[1871] 44. The nucleic acid of embodiment 43, wherein the at least one promoter operably linked to the second nucleotide sequence is a late promoter.
[1872] 45. The nucleic acid of embodiment 44, wherein the late promoter comprises the nucleotide sequence of SEQ ID NO: 561, an F17R promoter, or a D13L promoter.
[1873] 46. The nucleic acid of embodiment 44, wherein the late promoter comprises the nucleotide sequence of SEQ ID NO: 561.
[1874] 47. A nucleic acid comprising a recombinant vaccinia virus genome, comprising:
   [1875] (a) deletions in the following genes: C2L, C1L, N1L, N2L, M1L, M2L, K1L, K2L, K3L, K4L, K5L, K6L, K7R, F1L, F2L, F3L, B14R, B15R, B16R, B17L, B18R, B19R, and B20R, and optionally a deletion in the B8R gene;
   [1876] (b) deletions in the following genes in the 3′ ITR: B21R, B22R, B23R, B24R, B25R, B26R, B27R, B28R, and B29R;
   [1877] (c) a first transgene comprising a first nucleotide sequence encoding an antibody or antigen-binding fragment thereof that specifically binds to CTLA-4; and
   [1878] (d) a second transgene comprising a second nucleotide sequence encoding an IL-12 polypeptide;
   [1879] wherein the deletions in the C2L, F3L, B14R, and B29R vaccinia genes are partial deletions; and
   [1880] wherein the nucleic acid further comprises:
   [1881] (i) a nucleotide sequence comprising at least one promoter operably linked to the first nucleotide sequence, wherein the at least one promoter operably linked to the first nucleotide sequence is an H5R promoter, a pS promoter, or a LEO promoter; and/or
   [1882] (ii) a nucleotide sequence comprising at least one promoter operably linked to the second nucleotide sequence, wherein the at least one promoter operably linked to the second nucleotide sequence is a late promoter.
[1883] 48. The nucleic acid comprising embodiment 47, wherein the at least one promoter operably linked to the first nucleotide sequence is an H5R promoter.
[1884] 49. The nucleic acid comprising embodiment 47 or 48, wherein the late promoter comprises the nucleotide sequence of SEQ ID NO: 561, an F17R promoter, or a D13L promoter.
[1885] 50. The nucleic acid of embodiment 47 or 48, wherein the late promoter comprises the nucleotide sequence of SEQ ID NO: 561.
[1886] 51. The nucleic acid of any one of embodiments 39-50, wherein the first nucleotide sequence is in the same orientation as endogenous vaccinia virus genes that flank the first nucleotide sequence, and the second nucleotide sequence is in the same orientation as endogenous vaccinia virus genes that flank the second nucleotide sequence.
[1887] 52. The nucleic acid of any one of embodiments 39-51, wherein the IL-12 polypeptide is membrane-bound.
[1888] 53. The nucleic acid of any one of embodiments 39-52, wherein the IL-12 polypeptide comprises IL-12 p35 or IL-12 p70.
[1889] 54. The nucleic acid of any one of embodiments 39-53, wherein the first nucleotide sequence encodes an amino acid sequence comprising the amino acid sequence set forth in SEQ ID NO: 211.
[1890] 55. The nucleic acid of any one of embodiments 39-54, wherein the first nucleotide sequence comprises the sequence set forth in SEQ ID NO: 214.
[1891] 56. The nucleic acid of any one of embodiments 39-54, wherein the first nucleotide sequence is set forth in SEQ ID NO: 214.
[1892] 57. The nucleic acid of any one of embodiments 39-56, wherein the IL-12 polypeptide comprises the amino acid sequence set forth in SEQ ID NO: 212.
[1893] 58. The nucleic acid of any one of embodiments 39-57, wherein the second nucleotide sequence comprises the sequence set forth in SEQ ID NO: 215.
[1894] 59. The nucleic acid of any one of embodiments 39-57, wherein the second nucleotide sequence is set forth in SEQ ID NO: 215.
[1895] 60. A nucleic acid comprising a recombinant vaccinia virus genome, comprising:
   [1896] (a) deletions in the following genes: C2L, C1L, N1L, N2L, M1L, M2L, K1L, K2L, K3L, K4L, K5L, K6L, K7R, F1L, F2L, F3L, B8R, B14R, B15R, B16R, B17L, B18R, B 19R, and B20R;
   [1897] (b) deletions in the following genes in the 3′ ITR: B21R, B22R, B23R, B24R, B25R, B26R, B27R, B28R, and B29R;
   [1898] (c) a first transgene comprising a first nucleotide sequence encoding an antibody or antigen-binding fragment thereof that specifically binds to CTLA-4; and
   [1899] (d) a third transgene comprising a third nucleotide sequence encoding FLT3L; wherein the deletions in the C2L, F3L, B14R, and B29R vaccinia genes are partial deletions.
[1900] 61. The nucleic acid of embodiment 60, further comprising a nucleotide sequence comprising at least one promoter operably linked to the first nucleotide sequence.
[1901] 62. The nucleic acid of embodiment 61, wherein the at least one promoter operably linked to the first nucleotide sequence is an H5R promoter, a pS promoter, or a LEO promoter.
[1902] 63. The nucleic acid of embodiment 61, wherein the at least one promoter operably linked to the first nucleotide sequence is an H5R promoter.
[1903] 64. The nucleic acid of any one of embodiments 60-63, further comprising a nucleotide sequence comprising at least one promoter operably linked to the third nucleotide sequence.
[1904] 65. The nucleic acid of embodiment 64, wherein the at least one promoter operably linked to the third nucleotide sequence is a B8R promoter, a B19R promoter, a E3L promoter, an F11L promoter, or a B2R promoter.
[1905] 66. The nucleic acid of embodiment 64, wherein the at least one promoter operably linked to the third nucleotide sequence is a B8R promoter.
[1906] 67. The nucleic acid of embodiment 64, wherein the at least one promoter operably linked to the third nucleotide sequence is a B19R promoter.
[1907] 68. The nucleic acid of embodiment 64, wherein the at least one promoter operably linked to the third nucleotide sequence is a B8R promoter and a B19R promoter.
[1908] 69. A nucleic acid comprising a recombinant vaccinia virus genome, comprising:
   [1909] (a) deletions in the following genes: C2L, C1L, N1L, N2L, M1L, M2L, K1L, K2L, K3L, K4L, K5L, K6L, K7R, F1L, F2L, F3L, B14R, B15R, B16R, B17L, B18R, B19R, and B20R, and optionally a deletion in the B8R gene;
   [1910] (b) deletions in the following genes in the 3′ ITR: B21R, B22R, B23R, B24R, B25R, B26R, B27R, B28R, and B29R;
   [1911] (c) a first transgene comprising a first nucleotide sequence encoding an antibody or antigen-binding fragment thereof that specifically binds to CTLA-4; and
   [1912] (d) a third transgene comprising a third nucleotide sequence encoding FLT3L; wherein the deletions in the C2L, F3L, B14R, and B29R vaccinia genes are partial deletions; and
   [1913] wherein the nucleic acid further comprises:
   [1914] (i) a nucleotide sequence comprising at least one promoter operably linked to the first nucleotide sequence, wherein the at least one promoter operably linked to the first nucleotide sequence is an H5R promoter, a pS promoter, or a LEO promoter; and/or
   [1915] (ii) a nucleotide sequence comprising at least one promoter operably linked to the third nucleotide sequence, wherein the at least one promoter operably linked to the third nucleotide sequence is a B8R promoter, a B19R promoter, a E3L promoter, an F11L promoter, or a B2R promoter.
[1916] 70. The nucleic acid of embodiment 69, wherein the at least one promoter operably linked to the first nucleotide sequence is an H5R promoter.
[1917] 71. The nucleic acid of embodiment 69 or 70, wherein the at least one promoter operably linked to the third nucleotide sequence is a B8R promoter.
[1918] 72. The nucleic acid of embodiment 69 or 70, wherein the at least one promoter operably linked to the third nucleotide sequence is a B19R promoter.
[1919] 73. The nucleic acid of embodiment 69 or 70, wherein the at least one promoter operably linked to the third nucleotide sequence is a B8R promoter and a B19R promoter.
[1920] 74. The nucleic acid of any one of embodiments 60-73, wherein the first nucleotide sequence is in the same orientation as endogenous vaccinia virus genes that flank the first nucleotide sequence and the third nucleotide sequence is in the same orientation as endogenous vaccinia virus genes that flank the third nucleotide sequence.
[1921] 75. The nucleic acid of any one of embodiments 60-74, wherein the first nucleotide sequence encodes an amino acid sequence comprising the amino acid sequence set forth in SEQ ID NO: 211.
[1922] 76. The nucleic acid of any one of embodiments 60-75, wherein the first nucleotide sequence comprises the sequence set forth in SEQ ID NO: 214.
[1923] 77. The nucleic acid of any one of embodiments 60-75, wherein the first nucleotide sequence is set forth in SEQ ID NO: 214.
[1924] 78. The nucleic acid of any one of embodiments 60-77, wherein the FLT3L comprises the amino acid sequence set forth in SEQ ID NO: 213.
[1925] 79. The nucleic acid of any one of embodiments 60-78, wherein the third nucleotide sequence comprises the sequence set forth in SEQ ID NO: 216.
[1926] 80. The nucleic acid of any one of embodiments 60-78, wherein the third nucleotide sequence is set forth in SEQ ID NO: 216.
[1927] 81. A nucleic acid comprising a recombinant vaccinia virus genome, comprising:
   [1928] (a) deletions in the following genes: C2L, C1L, N1L, N2L, M1L, M2L, K1L, K2L, K3L, K4L, K5L, K6L, K7R, F1L, F2L, F3L, B8R, B14R, B15R, B16R, B17L, B18R, B 19R, and B20R;
   [1929] (b) deletions in the following genes in the 3′ ITR: B21R, B22R, B23R, B24R, B25R, B26R, B27R, B28R, and B29R;
   [1930] (c) a second transgene comprising a second nucleotide sequence encoding an IL-12 polypeptide; and
   [1931] (d) a third transgene comprising a third nucleotide sequence encoding FLT3L; wherein the deletions in the C2L, F3L, B14R, and B29R vaccinia genes are partial deletions.
[1932] 82. The nucleic acid of embodiment 81, further comprising a nucleotide sequence comprising at least one promoter operably linked to the second nucleotide sequence.
[1933] 83. The nucleic acid of embodiment 82, wherein the at least one promoter operably linked to the second nucleotide sequence is a late promoter.
[1934] 84. The nucleic acid of embodiment 83, wherein the late promoter comprises the nucleotide sequence of SEQ ID NO: 561, an F17R promoter, or a D13L promoter.
[1935] 85. The nucleic acid of embodiment 83, wherein the late promoter comprises the nucleotide sequence of SEQ ID NO: 561.
[1936] 86. The nucleic acid of any one of embodiments 81-85, further comprising a nucleotide sequence comprising at least one promoter operably linked to the third nucleotide sequence.
[1937] 87. The nucleic acid of embodiment 86, wherein the at least one promoter operably linked to the third nucleotide sequence is a B8R promoter, a B19R promoter, a E3L promoter, an F11L promoter, or a B2R promoter.
[1938] 88. The nucleic acid of embodiment 86, wherein the at least one promoter operably linked to the third nucleotide sequence is a B8R promoter.
[1939] 89. The nucleic acid of embodiment 86, wherein the at least one promoter operably linked to the third nucleotide sequence is a B19R promoter.
[1940] 90. The nucleic acid of embodiment 86, wherein the at least one promoter operably linked to the third nucleotide sequence is a B8R promoter and a B19R promoter.
[1941] 91. A nucleic acid comprising a recombinant vaccinia virus genome, comprising:
   [1942] (a) deletions in the following genes: C2L, C1L, N1L, N2L, M1L, M2L, K1L, K2L, K3L, K4L, K5L, K6L, K7R, F1L, F2L, F3L, B14R, B15R, B16R, B17L, B18R, B19R, and B20R, and optionally a deletion in the B8R gene;
   [1943] (b) deletions in the following genes in the 3′ ITR: B21R, B22R, B23R, B24R, B25R, B26R, B27R, B28R, and B29R;
   [1944] (c) a second transgene comprising a second nucleotide sequence encoding an IL-12 polypeptide; and
   [1945] (d) a third transgene comprising a third nucleotide sequence encoding FLT3L;
   [1946] wherein the deletions in the C2L, F3L, B14R, and B29R vaccinia genes are partial deletions; and
   [1947] wherein the nucleic acid further comprises:
   [1948] (i) a nucleotide sequence comprising at least one promoter operably linked to the second nucleotide sequence, wherein the at least one promoter operably linked to the second nucleotide sequence is a late promoter; and/or
   [1949] (ii) a nucleotide sequence comprising at least one promoter operably linked to the third nucleotide sequence, wherein the at least one promoter operably linked to the third nucleotide sequence is a B8R promoter, a B19R promoter, a E3L promoter, an F11L promoter, or a B2R promoter.
[1950] 92. The nucleic acid of embodiment 91, wherein the late promoter comprises the nucleotide sequence of SEQ ID NO: 561, an F17R promoter, or a D13L promoter.
[1951] 93. The nucleic acid of embodiment 91, wherein the late promoter comprises the nucleotide sequence of SEQ ID NO: 561.
[1952] 94. The nucleic acid of any one of embodiments 91-93, wherein the at least one promoter operably linked to the third nucleotide sequence is a B8R promoter.
[1953] 95. The nucleic acid of any one of embodiments 91-93, wherein the at least one promoter operably linked to the third nucleotide sequence is a B19R promoter.
[1954] 96. The nucleic acid of any one of embodiments 91-93, wherein the at least one promoter operably linked to the third nucleotide sequence is a B8R promoter and a B19R promoter.
[1955] 97. The nucleic acid of any one of embodiments 81-96, wherein the second nucleotide sequence is in the same orientation as endogenous vaccinia virus genes that flank the second nucleotide sequence, and the third nucleotide sequence is in the same orientation as endogenous vaccinia genes that flank the third nucleotide sequence.
[1956] 98. The nucleic acid of any one of embodiments 81-97, wherein the IL-12 polypeptide is membrane-bound.
[1957] 99. The nucleic acid of any one of embodiments 81-98, wherein the IL-12 polypeptide comprises IL-12 p35 or IL-12 p70.
[1958] 100. The nucleic acid of any one of embodiments 81-99, wherein the IL-12 polypeptide comprises the amino acid sequence set forth in SEQ ID NO: 212.
[1959] 101. The nucleic acid of any one of embodiments 81-100, wherein the second nucleotide sequence comprises the sequence set forth in SEQ ID NO: 215.
[1960] 102. The nucleic acid of any one of embodiments 81-100, wherein the second nucleotide sequence is set forth in SEQ ID NO: 215.
[1961] 103. The nucleic acid of any one of embodiments 81-102, wherein the FLT3L comprises the amino acid sequence set forth in SEQ ID NO: 213.
[1962] 104. The nucleic acid of any one of embodiments 81-103, wherein the third nucleotide sequence comprises the sequence set forth in SEQ ID NO: 216.
[1963] 105. The nucleic acid of any one of embodiments 81-103, wherein the third nucleotide sequence is set forth in SEQ ID NO: 216.
[1964] 106. A nucleic acid comprising a recombinant vaccinia virus genome, comprising:
   [1965] (a) deletions in the following genes: C2L, C1L, N1L, N2L, M1L, M2L, K1L, K2L, K3L, K4L, K5L, K6L, K7R, F1L, F2L, F3L, B8R, B14R, B15R, B16R, B17L, B18R, B 19R, and B20R;
   [1966] (b) deletions in the following genes in the 3′ ITR: B21R, B22R, B23R, B24R, B25R, B26R, B27R, B28R, and B29R;
   [1967] (c) a first transgene comprising a first nucleotide sequence encoding an antibody or antigen-binding fragment thereof that specifically binds to CTLA-4;
   [1968] (d) a second transgene comprising a second nucleotide sequence encoding an IL-12 polypeptide; and
   [1969] (e) a third transgene comprising a third nucleotide sequence encoding FLT3L;
   [1970] wherein the deletions in the C2L, F3L, B14R, and B29R vaccinia genes are partial deletions.
[1971] 107. The nucleic acid of embodiment 106, further comprising a nucleotide sequence comprising at least one promoter operably linked to the first nucleotide sequence.
[1972] 108. The nucleic acid of embodiment 107, wherein the at least one promoter operably linked to the first nucleotide sequence is an H5R promoter, a pS promoter, or a LEO promoter.
[1973] 109. The nucleic acid of embodiment 107, wherein the at least one promoter operably linked to the first nucleotide sequence is an H5R promoter.
[1974] 110. The nucleic acid of any one of embodiments 106-109, further comprising a nucleotide sequence comprising at least one promoter operably linked to the second nucleotide sequence.
[1975] 111. The nucleic acid of embodiment 110, wherein the at least one promoter operably linked to the second nucleotide sequence is a late promoter.
[1976] 112. The nucleic acid of embodiment 111, wherein the late promoter comprises the nucleotide sequence of SEQ ID NO: 561, an F17R promoter, or a D13L promoter.
[1977] 113. The nucleic acid of embodiment 111, wherein the late promoter comprises the nucleotide sequence of SEQ ID NO: 561.
[1978] 114. The nucleic acid of any one of embodiments 106-113, further comprising a nucleotide sequence comprising at least one promoter operably linked to the third nucleotide sequence.
[1979] 115. The nucleic acid of embodiment 114, wherein the at least one promoter operably linked to the third nucleotide sequence is a B8R promoter, a B19R promoter, a E3L promoter, an F 11L promoter, or a B2R promoter.
[1980] 116. The nucleic acid of embodiment 114, wherein the at least one promoter operably linked to the third nucleotide sequence is a B8R promoter.
[1981] 117. The nucleic acid of embodiment 114, wherein the at least one promoter operably linked to the third nucleotide sequence is a B19R promoter.
[1982] 118. The nucleic acid of embodiment 114, wherein the at least one promoter operably linked to the third nucleotide sequence is a B8R promoter and a B19R promoter.
[1983] 119. A nucleic acid comprising a recombinant vaccinia virus genome, comprising:
   [1984] (a) deletions in the following genes: C2L, C1L, N1L, N2L, M1L, M2L, K1L, K2L, K3L, K4L, K5L, K6L, K7R, F1L, F2L, F3L, B14R, B15R, B16R, B17L, B18R, B19R, and B20R, and optionally a deletion in the B8R gene;
   [1985] (b) deletions in the following genes in the 3′ ITR: B21R, B22R, B23R, B24R, B25R, B26R, B27R, B28R, and B29R;
   [1986] (c) a first transgene comprising a first nucleotide sequence encoding an antibody or antigen-binding fragment thereof that specifically binds to CTLA-4;
   [1987] (d) a second transgene comprising a second nucleotide sequence encoding an IL-12 polypeptide; and
   [1988] (e) a third transgene comprising a third nucleotide sequence encoding FLT3L;
   [1989] wherein the deletions in the C2L, F3L, B14R, and B29R vaccinia genes are partial deletions; and
   [1990] wherein the nucleic acid further comprises:
   [1991] (i) a nucleotide sequence comprising at least one promoter operably linked to the first nucleotide sequence, wherein the at least one promoter operably linked to the first nucleotide sequence is an H5R promoter, a pS promoter, or a LEO promoter;
   [1992] (ii) a nucleotide sequence comprising at least one promoter operably linked to the second nucleotide sequence, wherein the at least one promoter operably linked to the second nucleotide sequence is a late promoter; and/or
   [1993] (iii) a nucleotide sequence comprising at least one promoter operably linked to the third nucleotide sequence, wherein the at least one promoter operably linked to the third nucleotide sequence is a B8R promoter, a B19R promoter, a E3L promoter, an F11L promoter, or a B2R promoter.
[1994] 120. The nucleic acid of embodiment 119, wherein the at least one promoter operably linked to the first nucleotide sequence is an H5R promoter.
[1995] 121. The nucleic acid of embodiment 119 or 120, wherein the late promoter comprises the nucleotide sequence of SEQ ID NO: 561, an F17R promoter, or a D13L promoter.
[1996] 122. The nucleic acid of embodiment 119 or 120, wherein the late promoter comprises the nucleotide sequence of SEQ ID NO: 561.
[1997] 123. The nucleic acid of any one of embodiments 119-122, wherein the at least one promoter operably linked to the third nucleotide sequence is a B8R promoter.
[1998] 124. The nucleic acid of any one of embodiments 119-122, wherein the at least one promoter operably linked to the third nucleotide sequence is a B19R promoter.
[1999] 125. The nucleic acid of any one of embodiments 119-122, wherein the at least one promoter operably linked to the third nucleotide sequence is a B8R promoter and a B19R promoter.
[2000] 126. The nucleic acid of any one of embodiments 106-125, wherein the first nucleotide sequence is in the same orientation as endogenous vaccinia virus genes that flank the first nucleotide sequence, the second nucleotide sequence is in the same orientation as endogenous vaccinia virus genes that flank the second nucleotide sequence, and the third nucleotide sequence is in the same orientation as endogenous vaccinia virus genes that flank the third nucleotide sequence.
[2001] 127. The nucleic acid of any one of embodiments 106-126, wherein the IL-12 polypeptide is membrane-bound.
[2002] 128. The nucleic acid of any one of embodiments 106-127, wherein the IL-12 polypeptide comprises IL-12 p35 or IL-12 p70.
[2003] 129. The nucleic acid of any one of embodiments 106-128, wherein the first nucleotide sequence encodes an amino acid sequence comprising the amino acid sequence set forth in SEQ ID NO: 211.
[2004] 130. The nucleic acid of any one of embodiments 106-129, wherein the first nucleotide sequence comprises the sequence set forth in SEQ ID NO: 214.
[2005] 131. The nucleic acid of any one of embodiments 106-129, wherein the first nucleotide sequence is set forth in SEQ ID NO: 214.
[2006] 132. The nucleic acid of any one of embodiments 106-131, wherein the IL-12 polypeptide comprises the amino acid sequence set forth in SEQ ID NO: 212.
[2007] 133. The nucleic acid of any one of embodiments 106-132, wherein the second nucleotide sequence comprises the sequence set forth in SEQ ID NO: 215.
[2008] 134. The nucleic acid of any one of embodiments 106-132, wherein the second nucleotide sequence is set forth in SEQ ID NO: 215.
[2009] 135. The nucleic acid of any one of embodiments 106-134, wherein the FLT3L comprises the amino acid sequence set forth in SEQ ID NO: 213.
[2010] 136. The nucleic acid of any one of embodiments 106-135, wherein the third nucleotide sequence comprises the sequence set forth in SEQ ID NO: 216.
[2011] 137. The nucleic acid of any one of embodiments 106-135, wherein the third nucleotide sequence is set forth in SEQ ID NO: 216.
[2012] 138. The nucleic acid of any one of embodiments 106-137, wherein the first transgene is present between the partial C2L and F3L vaccinia genes, and the second transgene and the third transgene are present in the locus of the deletion in the B8R gene.
[2013] 139. The nucleic acid of embodiment 138, wherein the third transgene is upstream of the second transgene.
[2014] 140. The nucleic acid of any one of embodiments 1-10, 39-80, and 106-137, wherein the first transgene is present between the partial C2L and F3L vaccinia genes.
[2015] 141. The nucleic acid of any one of embodiments 11-24, 39-59, and 81-137, wherein the second transgene is present between the partial C2L and F3L vaccinia genes.
[2016] 142. The nucleic acid of any one of embodiments 25-38 and 60-137, wherein the third transgene is present between the partial C2L and F3L vaccinia genes.
[2017] 143. The nucleic acid of any one of embodiments 1-10, 39-80, and 106-137, wherein the first transgene is present in the locus of the deletion in the B8R gene.
[2018] 144. The nucleic acid of any one of embodiments 11-24, 39-59, and 81-137, wherein the second transgene is present in the locus of the deletion in the B8R gene.
[2019] 145. The nucleic acid of any one of embodiments 25-38 and 60-137, wherein the third transgene is present in the locus of the deletion in the B8R gene.
[2020] 146. The nucleic acid of any one of embodiments 1-10, 39-80, and 106-137, wherein the first transgene is present between the partial B14R and B29R vaccinia genes.
[2021] 147. The nucleic acid of any one of embodiments 11-24, 39-59, and 81-137, wherein the second transgene is present between the partial B14R and B29R vaccinia genes.
[2022] 148. The nucleic acid of any one of embodiments 25-38 and 60-137, wherein the third transgene is present between the partial B14R and B29R vaccinia genes.
[2023] 149. The nucleic acid of any one of embodiments 39-59 and 106-137, wherein the first transgene and the second transgene are present between the partial C2L and F3L vaccinia genes.
[2024] 150. The nucleic acid of any one of embodiments 39-59 and 106-137, wherein the first transgene and the second transgene are present in the locus of the deletion in the B8R gene.
[2025] 151. The nucleic acid of any one of embodiments 39-59 and 106-137, wherein the first transgene and the second transgene are present between the partial B14R and B29R vaccinia genes.
[2026] 152. The nucleic acid of any one of embodiments 60-80 and 106-137, wherein the first transgene and the third transgene are present between the partial C2L and F3L vaccinia genes.
[2027] 153. The nucleic acid of any one of embodiments 60-80 and 106-137, wherein the first transgene and the third transgene are present in the locus of the deletion in the B8R gene.
[2028] 154. The nucleic acid of any one of embodiments 60-80 and 106-137, wherein the first transgene and the third transgene are present between the partial B14R and B29R vaccinia genes.
[2029] 155. The nucleic acid of any one of embodiments 81-137, wherein the second transgene and the third transgene are present between the partial C2L and F3L vaccinia genes.
[2030] 156. The nucleic acid of any one of embodiments 81-137, wherein the second transgene and the third transgene are present in the locus of the deletion in the B8R gene.
[2031] 157. The nucleic acid of any one of embodiments 81-137, wherein the second transgene and the third transgene are present between the partial B14R and B29R vaccinia genes.
[2032] 158. The nucleic acid of any one of embodiments 39-59 and 106-137, wherein the first transgene is present between the partial C2L and F3L vaccinia genes, and the second transgene is present in the locus of the deletion in the B8R gene.
[2033] 159. The nucleic acid of any one of embodiments 39-59 and 106-137, wherein the second transgene is present between the partial C2L and F3L vaccinia genes, and the first transgene is present in the locus of the deletion in the B8R gene.
[2034] 160. The nucleic acid of any one of embodiments 60-80 and 106-137, wherein the first transgene is present between the partial C2L and F3L vaccinia genes, and the third transgene is present in the locus of the deletion in the B8R gene.
[2035] 161. The nucleic acid of any one of embodiments 60-80 and 106-137, wherein the third transgene is present between the partial C2L and F3L vaccinia genes, and the first transgene is present in the locus of the deletion in the B8R gene.
[2036] 162. The nucleic acid of any one of embodiments 81-137, wherein the second transgene is present between the partial C2L and F3L vaccinia genes, and the third transgene is present in the locus of the deletion in the B8R gene.
[2037] 163. The nucleic acid of any one of embodiments 81-137, wherein the third transgene is present between the partial C2L and F3L vaccinia genes, and the second transgene is present in the locus of the deletion in the B8R gene.
[2038] 164. The nucleic acid of any one of embodiments 39-59 and 106-137, wherein the first transgene is present between the partial C2L and F3L vaccinia genes, and the second transgene is present between the partial B14R and B29R vaccinia genes.
[2039] 165. The nucleic acid of any one of embodiments 39-59 and 106-137, wherein the second transgene is present between the partial C2L and F3L vaccinia genes, and the first transgene is present between the partial B14R and B29R vaccinia genes.
[2040] 166. The nucleic acid of any one of embodiments 60-80 and 106-137, wherein the first transgene is present between the partial C2L and F3L vaccinia genes, and the third transgene is present between the partial B14R and B29R vaccinia genes.
[2041] 167. The nucleic acid of any one of embodiments 60-80 and 106-137, wherein the third transgene is present between the partial C2L and F3L vaccinia genes, and the first transgene is present between the partial B14R and B29R vaccinia genes.
[2042] 168. The nucleic acid of any one of embodiments 81-137, wherein the second transgene is present between the partial C2L and F3L vaccinia genes, and the third transgene is present between the partial B14R and B29R vaccinia genes.
[2043] 169. The nucleic acid of any one of embodiments 81-137, wherein the third transgene is present between the partial C2L and F3L vaccinia genes, and the second transgene is present between the partial B14R and B29R vaccinia genes.
[2044] 170. The nucleic acid of any one of embodiments 39-59 and 106-137, wherein the first transgene is present in the locus of the deletion in the B8R gene, and the second transgene is present between the partial B14R and B29R vaccinia genes.
[2045] 171. The nucleic acid of any one of embodiments 39-59 and 106-137, wherein the second transgene is present in the locus of the deletion in the B8R gene, and the first transgene is present between the partial B14R and B29R vaccinia genes.
[2046] 172. The nucleic acid of any one of embodiments 60-80 and 106-137, wherein the first transgene is present in the locus of the deletion in the B8R gene, and the third transgene is present between the partial B14R and B29R vaccinia genes.
[2047] 173. The nucleic acid of any one of embodiments 60-80 and 106-137, wherein the third transgene is present in the locus of the deletion in the B8R gene, and the first transgene is present between the partial B14R and B29R vaccinia genes.
[2048] 174. The nucleic acid of any one of embodiments 81-137, wherein the second transgene is present in the locus of the deletion in the B8R gene, and the third transgene is present between the partial B14R and B29R vaccinia genes.
[2049] 175. The nucleic acid of any one of embodiments 81-137, wherein the third transgene is present in the locus of the deletion in the B8R gene, and the second transgene is present between the partial B14R and B29R vaccinia genes.
[2050] 176. The nucleic acid of any one of embodiments 106-137, wherein the first transgene, the second transgene, and the third transgene are present between the partial C2L and F3L vaccinia genes.
[2051] 177. The nucleic acid of any one of embodiments 106-137, wherein the first transgene, the second transgene, and the third transgene are present in the locus of the deletion in the B8R gene.
[2052] 178. The nucleic acid of any one of embodiments 106-137, wherein the first transgene, the second transgene, and the third transgene are present between the partial B14R and B29R vaccinia genes.
[2053] 179. The nucleic acid of any one of embodiments 106-137, wherein the first transgene is present between the partial C2L and F3L vaccinia genes, and the second transgene and the third transgene are present in the locus of the deletion in the B8R gene.
[2054] 180. The nucleic acid of any one of embodiments 106-137, wherein the second transgene is present between the partial C2L and F3L vaccinia genes, and the first transgene and the third transgene are present in the locus of the deletion in the B8R gene.
[2055] 181. The nucleic acid of any one of embodiments 106-137, wherein the third transgene is present between the partial C2L and F3L vaccinia genes, and the first transgene and the second transgene are present in the locus of the deletion in the B8R gene.
[2056] 182. The nucleic acid of any one of embodiments 106-137, wherein the first transgene and the second transgene are present between the partial C2L and F3L vaccinia genes, and the third transgene is present in the locus of the deletion in the B8R gene.
[2057] 183. The nucleic acid of any one of embodiments 106-137, wherein the first transgene and the third transgene are present between the partial C2L and F3L vaccinia genes, and the second transgene is present in the locus of the deletion in the B8R gene.
[2058] 184. The nucleic acid of any one of embodiments 106-137, wherein the second transgene and the third transgene are present between the partial C2L and F3L vaccinia genes, and the first transgene is present in the locus of the deletion in the B8R gene.
[2059] 185. The nucleic acid of any one of embodiments 106-137, wherein the first transgene is present within between the partial C2L and F3L vaccinia genes, and the second transgene and the third transgene are present between the partial B14R and B29R vaccinia genes.
[2060] 186. The nucleic acid of any one of embodiments 106-137, wherein the second transgene is present between the partial C2L and F3L vaccinia genes, and the first transgene and the third transgene are present between the partial B14R and B29R vaccinia genes.
[2061] 187. The nucleic acid of any one of embodiments 106-137, wherein the third transgene is present between the partial C2L and F3L vaccinia genes, and the first transgene and the second transgene are present between the partial B14R and B29R vaccinia genes.
[2062] 188. The nucleic acid of any one of embodiments 106-137, wherein the first transgene and the second transgene are present between the partial C2L and F3L vaccinia genes, and the third transgene is present between the partial B14R and B29R vaccinia genes.
[2063] 189. The nucleic acid of any one of embodiments 106-137, wherein the first transgene and the third transgene are present between the partial C2L and F3L vaccinia genes, and the second transgene is present between the partial B14R and B29R vaccinia genes.
[2064] 190. The nucleic acid of any one of embodiments 106-137, wherein the second transgene and the third transgene are present between the partial C2L and F3L vaccinia genes, and the first transgene is present between the partial B14R and B29R vaccinia genes.
[2065] 191. The nucleic acid of any one of embodiments 106-137, wherein the first transgene is present in the locus of the deletion in the B8R gene, and the second transgene and the third transgene are present between the partial B14R and B29R vaccinia genes.
[2066] 192. The nucleic acid of any one of embodiments 106-137, wherein the second transgene is present in the locus of the deletion in the B8R gene, and the first transgene and the third transgene are present between the partial B14R and B29R vaccinia genes.
[2067] 193. The nucleic acid of any one of embodiments 106-137, wherein the third transgene is present in the locus of the deletion in the B8R gene, and the first transgene and the second transgene are present between the partial B14R and B29R vaccinia genes.
[2068] 194. The nucleic acid of any one of embodiments 106-137, wherein the first transgene and the second transgene are present in the locus of the deletion in the B8R gene, and the third transgene is present between the partial B14R and B29R vaccinia genes.
[2069] 195. The nucleic acid of any one of embodiments 106-137, wherein the first transgene and the third transgene are present in the locus of the deletion in the B8R gene, and the second transgene is present between the partial B14R and B29R vaccinia genes.
[2070] 196. The nucleic acid of any one of embodiments 106-137, wherein the second transgene and the third transgene are present in the locus of the deletion in the B8R gene, and the first transgene is present between the partial B14R and B29R vaccinia genes.
[2071] 197. The nucleic acid of any one of embodiments 106-137, wherein the first transgene is present between the partial C2L and F3L vaccinia genes, the second transgene is present in the locus of the deletion in the B8R gene, and the third transgene is present between the partial B14R and B29R vaccinia genes.
[2072] 198. The nucleic acid of any one of embodiments 106-137, wherein the first transgene is present between the partial C2L and F3L vaccinia genes, the third transgene is present in the locus of the deletion in the B8R gene, and the second transgene is present between the partial B14R and B29R vaccinia genes.
[2073] 199. The nucleic acid of any one of embodiments 106-137, wherein the second transgene is present between the partial C2L and F3L vaccinia genes, the first transgene is present in the locus of the deletion in the B8R gene, and the third transgene is present between the partial B14R and B29R vaccinia genes.
[2074] 200. The nucleic acid of any one of embodiments 106-137, wherein the second transgene is present between the partial C2L and F3L vaccinia genes, the third transgene is present in the locus of the deletion in the B8R gene, and the first transgene is present between the partial B14R and B29R vaccinia genes.
[2075] 201. The nucleic acid of any one of embodiments 106-137, wherein the third transgene is present between the partial C2L and F3L vaccinia genes, the first transgene is present in the locus of the deletion in the B8R gene, and the second transgene is present between the partial B14R and B29R vaccinia genes.
[2076] 202. The nucleic acid of any one of embodiments 106-137, wherein the third transgene is present between the partial C2L and F3L vaccinia genes, the second transgene is present in the locus of the deletion in the B8R gene, and the first transgene is present between the partial B14R and B29R vaccinia genes.
[2077] 203. The nucleic acid of any one of embodiments 1-202, wherein the deletion in the B8R gene is a deletion of at least 50% of the B8R gene sequence.
[2078] 204. The nucleic acid of any one of embodiments 1-202, wherein the deletion in the B8R gene is a deletion of at least 60% of the B8R gene sequence.
[2079] 205. The nucleic acid of any one of embodiments 1-202, wherein the deletion in the B8R gene is a deletion of at least 70% of the B8R gene sequence.
[2080] 206. The nucleic acid of any one of embodiments 1-202, wherein the deletion in the B8R gene is a deletion of at least 80% of the B8R gene sequence.
[2081] 207. The nucleic acid of any one of embodiments 1-202, wherein the deletion in the B8R gene is a deletion of about 75% of the B8R gene sequence.
[2082] 208. The nucleic acid of any one of embodiments 1-202, wherein the deletion in the B8R gene is a deletion of about 80% of the B8R gene sequence.
[2083] 209. The nucleic acid of any one of embodiments 1-208, wherein the recombinant vaccinia virus genome is derived from the genome of a Copenhagen strain vaccinia virus.
[2084] 210. A nucleic acid comprising a recombinant vaccinia virus genome, comprising:
   [2085] (a) deletions in the following genes: C2L, C1L, N1L, N2L, M1L, M2L, K1L, K2L, K3L, K4L, K5L, K6L, K7R, F1L, F2L, F3L, B14R, B15R, B16R, B17L, B18R, B19R, and B20R, and optionally a deletion in the B8R gene;
   [2086] (b) deletions in the following genes in the 3′ ITR: B21R, B22R, B23R, B24R, B25R, B26R, B27R, B28R, and B29R;
   [2087] (c) a first transgene comprising a first nucleotide sequence encoding an antibody or antigen-binding fragment thereof that specifically binds to CTLA-4;
   [2088] (d) a second transgene comprising a second nucleotide sequence encoding an IL-12 polypeptide; and
   [2089] (e) a third transgene comprising a third nucleotide sequence encoding FLT3L; wherein the deletions in the C2L, F3L, B14R, and B29R vaccinia genes are partial deletions; and
   [2090] wherein the nucleic acid further comprises:
   [2091] (i) a nucleotide sequence comprising at least one promoter operably linked to the first nucleotide sequence, wherein the at least one promoter operably linked to the first nucleotide sequence is an H5R promoter;
   [2092] (ii) a nucleotide sequence comprising at least one promoter operably linked to the second nucleotide sequence, wherein the at least one promoter operably linked to the second nucleotide sequence is a late promoter that comprises the nucleotide sequence of SEQ ID NO: 561; and
   [2093] (iii) a nucleotide sequence comprising at least one promoter operably linked to the third nucleotide sequence, wherein the at least one promoter operably linked to the third nucleotide sequence is a B8R promoter and a B19R promoter.
[2094] 211. The nucleic acid of embodiment 210, wherein the first nucleotide sequence is in the same orientation as endogenous vaccinia virus genes that flank the first nucleotide sequence, the second nucleotide sequence is in the same orientation as endogenous vaccinia virus genes that flank the second nucleotide sequence, and the third nucleotide sequence is in the same orientation as endogenous vaccinia virus genes that flank the third nucleotide sequence.
[2095] 212. The nucleic acid of embodiment 210 or 211, wherein the first transgene is present between the partial C2L and F3L vaccinia genes, and the second transgene and the third transgene are present in the locus of the deletion in the B8R gene.
[2096] 213. The nucleic acid of embodiment 210 or 211, wherein the first transgene is present between the partial B14R and B29R vaccinia genes, and the second transgene and the third transgene are present in the locus of the deletion in the B8R gene.
[2097] 214. The nucleic acid of embodiment 212 or 213, wherein the third transgene is upstream of the second transgene.
[2098] 215. The nucleic acid of embodiment 212 or 213, wherein the third transgene is downstream of the second transgene.
[2099] 216. A nucleic acid comprising a recombinant vaccinia virus genome, comprising:
   [2100] (a) deletions in the following genes: C2L, C1L, N1L, N2L, M1L, M2L, K1L, K2L, K3L, K4L, K5L, K6L, K7R, F1L, F2L, F3L, B14R, B15R, B16R, B17L, B18R, B19R, and B20R, and optionally a deletion in the B8R gene;
   [2101] (b) deletions in the following genes in the 3′ ITR: B21R, B22R, B23R, B24R, B25R, B26R, B27R, B28R, and B29R;
   [2102] (c) a first transgene comprising a first nucleotide sequence encoding an antibody or antigen-binding fragment thereof that specifically binds to CTLA-4, wherein the first nucleotide sequence is in the same orientation as endogenous vaccinia virus genes that flank the first nucleotide sequence, and wherein the first transgene is present between the partial C2L and F3L vaccinia genes;
   [2103] (d) a second transgene comprising a second nucleotide sequence encoding an IL-12 polypeptide, wherein the second nucleotide sequence is in the same orientation as endogenous vaccinia virus genes that flank the second nucleotide sequence, and wherein the second transgene is present in the locus of the deletion in the B8R gene; and
   [2104] (e) a third transgene comprising a third nucleotide sequence encoding FLT3L, wherein the third nucleotide sequence is in the same orientation as endogenous vaccinia virus genes that flank the third nucleotide sequence, wherein the third transgene is present in the locus of the deletion in the B8R gene, and wherein the third transgene is upstream of the second transgene;
   [2105] wherein the deletions in the C2L, F3L, B14R, and B29R vaccinia genes are partial deletions; and
   [2106] wherein the nucleic acid further comprises:
   [2107] (i) a nucleotide sequence comprising at least one promoter operably linked to the first nucleotide sequence, wherein the at least one promoter operably linked to the first nucleotide sequence is an H5R promoter;
   [2108] (ii) a nucleotide sequence comprising at least one promoter operably linked to the second nucleotide sequence, wherein the at least one promoter operably linked to the second nucleotide sequence is a late promoter that comprises the nucleotide sequence of SEQ ID NO: 561; and
   [2109] (iii) a nucleotide sequence comprising at least one promoter operably linked to the third nucleotide sequence, wherein the at least one promoter operably linked to the third nucleotide sequence is a B8R promoter and a B19R promoter.
[2110] 217. A nucleic acid comprising a recombinant vaccinia virus genome, comprising:
   [2111] (a) deletions in the following genes: C2L, C1L, N1L, N2L, M1L, M2L, K1L, K2L, K3L, K4L, K5L, K6L, K7R, F1L, F2L, F3L, B14R, B15R, B16R, B17L, B18R, B19R, and B20R, and optionally a deletion in the B8R gene;
   [2112] (b) deletions in the following genes in the 3′ ITR: B21R, B22R, B23R, B24R, B25R, B26R, B27R, B28R, and B29R;
   [2113] (c) a first transgene comprising a first nucleotide sequence encoding an antibody or antigen-binding fragment thereof that specifically binds to CTLA-4, wherein the first nucleotide sequence is in the same orientation as endogenous vaccinia virus genes that flank the first nucleotide sequence, and wherein the first transgene is present between the partial C2L and F3L vaccinia genes;
   [2114] (d) a second transgene comprising a second nucleotide sequence encoding an IL-12 polypeptide, wherein the second nucleotide sequence is in the same orientation as endogenous vaccinia virus genes that flank the second nucleotide sequence, and
   [2115] wherein the second transgene is present in the locus of the deletion in the B8R gene; and
   [2116] (e) a third transgene comprising a third nucleotide sequence encoding FLT3L;
   [2117] wherein the deletions in the C2L, F3L, B14R, and B29R vaccinia genes are partial deletions, wherein the third nucleotide sequence is in the same orientation as endogenous vaccinia virus genes that flank the third nucleotide sequence, wherein the third transgene is present in the locus of the deletion in the B8R gene, and wherein the third transgene is downstream of the second transgene; and
   [2118] wherein the nucleic acid further comprises:
   [2119] (i) a nucleotide sequence comprising at least one promoter operably linked to the first nucleotide sequence, wherein the at least one promoter operably linked to the first nucleotide sequence is an H5R promoter;
   [2120] (ii) a nucleotide sequence comprising at least one promoter operably linked to the second nucleotide sequence, wherein the at least one promoter operably linked to the second nucleotide sequence is a late promoter that comprises the nucleotide sequence of SEQ ID NO: 561; and
   [2121] (iii) a nucleotide sequence comprising at least one promoter operably linked to the third nucleotide sequence, wherein the at least one promoter operably linked to the third nucleotide sequence is a B8R promoter and a B19R promoter.
[2122] 218. A nucleic acid comprising a recombinant vaccinia virus genome, comprising:
   [2123] (a) deletions in the following genes: C2L, C1L, N1L, N2L, M1L, M2L, K1L, K2L, K3L, K4L, K5L, K6L, K7R, F1L, F2L, F3L, B14R, B15R, B16R, B17L, B18R, B19R, and B20R, and optionally a deletion in the B8R gene;
   [2124] (b) deletions in the following genes in the 3′ ITR: B21R, B22R, B23R, B24R, B25R, B26R, B27R, B28R, and B29R;
   [2125] (c) a first transgene comprising a first nucleotide sequence encoding an antibody or antigen-binding fragment thereof that specifically binds to CTLA-4, wherein the first nucleotide sequence is in the same orientation as endogenous vaccinia virus genes that flank the first nucleotide sequence, and wherein the first transgene is present between the partial B14R and B29R vaccinia genes;
   [2126] (d) a second transgene comprising a second nucleotide sequence encoding an IL-12 polypeptide, wherein the second nucleotide sequence is in the same orientation as endogenous vaccinia virus genes that flank the second nucleotide sequence, and 1

[2127] wherein the second transgene is present in the locus of the deletion in the B8R gene; and
[2128] (e) a third transgene comprising a third nucleotide sequence encoding FLT3L;
[2129] wherein the deletions in the C2L, F3L, B14R, and B29R vaccinia genes are partial deletions, wherein the third nucleotide sequence is in the same orientation as endogenous vaccinia virus genes that flank the third nucleotide sequence, wherein the third transgene is present in the locus of the deletion in the B8R gene, and wherein the third transgene is upstream of the second transgene; and
[2130] wherein the nucleic acid further comprises:
[2131] (i) a nucleotide sequence comprising at least one promoter operably linked to the first nucleotide sequence, wherein the at least one promoter operably linked to the first nucleotide sequence is an H5R promoter;
[2132] (ii) a nucleotide sequence comprising at least one promoter operably linked to the second nucleotide sequence, wherein the at least one promoter operably linked to the second nucleotide sequence is a late promoter that comprises the nucleotide sequence of SEQ ID NO: 561; and
[2133] (iii) a nucleotide sequence comprising at least one promoter operably linked to the third nucleotide sequence, wherein the at least one promoter operably linked to the third nucleotide sequence is a B8R promoter and a B19R promoter.
[2134] 219. A nucleic acid comprising a recombinant vaccinia virus genome, comprising:
   [2135] (a) deletions in the following genes: C2L, C1L, N1L, N2L, M1L, M2L, K1L, K2L, K3L, K4L, K5L, K6L, K7R, F1L, F2L, F3L, B14R, B15R, B16R, B17L, B18R, B19R, and B20R, and optionally a deletion in the B8R gene;
   [2136] (b) deletions in the following genes in the 3′ ITR: B21R, B22R, B23R, B24R, B25R, B26R, B27R, B28R, and B29R;
   [2137] (c) a first transgene comprising a first nucleotide sequence encoding an antibody or antigen-binding fragment thereof that specifically binds to CTLA-4, wherein the first nucleotide sequence is in the same orientation as endogenous vaccinia virus genes that flank the first nucleotide sequence, and wherein the first transgene is present between the partial B14R and B29R vaccinia genes;
   [2138] (d) a second transgene comprising a second nucleotide sequence encoding an IL-12 polypeptide, wherein the second nucleotide sequence is in the same orientation as endogenous vaccinia virus genes that flank the second nucleotide sequence, and
   [2139] wherein the second transgene is present in the locus of the deletion in the B8R gene; and
   [2140] (e) a third transgene comprising a third nucleotide sequence encoding FLT3L;
   [2141] wherein the deletions in the C2L, F3L, B14R, and B29R vaccinia genes are partial deletions, wherein the third nucleotide sequence is in the same orientation as endogenous vaccinia virus genes that flank the third nucleotide sequence, wherein the third transgene is present in the locus of the deletion in the B8R gene, and wherein the third transgene is downstream of the second transgene; and
   [2142] wherein the nucleic acid further comprises:
   [2143] (i) a nucleotide sequence comprising at least one promoter operably linked to the first nucleotide sequence, wherein the at least one promoter operably linked to the first nucleotide sequence is an H5R promoter;
   [2144] (ii) a nucleotide sequence comprising at least one promoter operably linked to the second nucleotide sequence, wherein the at least one promoter operably linked to the second nucleotide sequence is a late promoter that comprises the nucleotide sequence of SEQ ID NO: 561; and
   [2145] (iii) a nucleotide sequence comprising at least one promoter operably linked to the third nucleotide sequence, wherein the at least one promoter operably linked to the third nucleotide sequence is a B8R promoter and a B19R promoter.
[2146] 220. The nucleic acid of any one of embodiments 1-219, wherein the recombinant vaccinia virus genome comprises a vaccinia virus nucleotide sequence of SEQ ID NO: 624.
[2147] 221. The nucleic acid of any one of embodiments 1-105, wherein the recombinant vaccinia virus genome comprises a vaccinia virus nucleotide sequence of SEQ ID NO: 210.
[2148] 222. A virus comprising the nucleic acid comprising a recombinant vaccinia virus genome of any one of embodiments 1-221.
[2149] 223. A packaging cell line comprising the nucleic acid of any one of embodiments 1-221.
[2150] 224. A packaging cell line comprising the virus of embodiment 222.
[2151] 225. A pharmaceutical composition comprising the virus of embodiment 222 and a physiologically acceptable carrier.
[2152] 226. A kit comprising the nucleic acid of any one of embodiments 1-221 and a package insert instructing a user of the kit to express the nucleic acid in a host cell.
[2153] 227. A kit comprising the virus of embodiment 222 and a package insert instructing a user of the kit to express the virus in a host cell.
[2154] 228. A kit comprising the virus of embodiment 222 and a package insert instructing a user to administer a therapeutically effective amount of the virus to a mammalian patient having cancer, thereby treating the cancer.
[2155] 229. The kit of embodiment 228, wherein the mammalian patient is a human patient.
[2156] 230. A method of treating cancer in a mammalian patient, the method comprising administering to the mammalian patient a therapeutically effective amount of the virus of embodiment 222.
[2157] 231. A method of treating cancer in a mammalian patient, the method comprising administering to the mammalian patient a therapeutically effective amount of the pharmaceutical composition of embodiment 225.
[2158] 232. The method of embodiment 230 or 231, wherein the mammalian patient is a human patient.
[2159] 233. The method of any one of embodiments 230-232, wherein the cancer is selected from the group consisting of leukemia, lymphoma, liver cancer, bone cancer, lung cancer, brain cancer, bladder cancer, gastrointestinal cancer, breast cancer, cardiac cancer, cervical cancer, uterine cancer, head and neck cancer, gallbladder cancer, laryngeal cancer, lip and oral cavity cancer, ocular cancer, melanoma, pancreatic cancer, prostate cancer, colorectal cancer, testicular cancer, and throat cancer.
[2160] 234. The method of any one of embodiments 230-233, wherein the method further comprises administering to the mammalian patient an immune checkpoint inhibitor.
[2161] 235. The method of embodiment 234, wherein the immune checkpoint inhibitor is selected from the group consisting of OX40 ligand, ICOS ligand, anti-CD47 antibody or antigen-binding fragment thereof, anti-CD40/CD40L antibody or antigen-binding fragment thereof, anti-Lag3 antibody or antigen-binding fragment thereof, anti-CTLA-4 antibody or antigen-binding fragment thereof, anti-PD-L1 antibody or antigen-binding fragment thereof, anti-PD1 antibody or antigen-binding fragment thereof, and anti-Tim-3 antibody or antigen-binding fragment thereof.
[2162] 236. The method of embodiment 234, wherein the immune checkpoint inhibitor is an anti-PD1 antibody or antigen-binding fragment thereof or an anti-CTLA-4 antibody or antigen-binding fragment thereof.
[2163] 237. The method of embodiment 234, wherein the immune checkpoint inhibitor is an anti-PD1 antibody or antigen-binding fragment thereof.
[2164] 238. The method of embodiment 234, wherein the immune checkpoint inhibitor is an anti-CTLA-4 antibody or antigen-binding fragment thereof.
[2165] 239. The method of embodiment 234, wherein the immune checkpoint inhibitor is an anti-PD-L1 antibody or antigen-binding fragment thereof.
[2166] 240. The method of any one of embodiments 219-228, wherein the method further comprises administering to the mammalian patient an interleukin.
[2167] 241. The method of embodiment 240, wherein the interleukin is selected from the group consisting of IL-1 alpha, IL-1 beta, IL-2, IL-4, IL-7, IL-10, IL-12 p35, IL-12 p40, IL-12 p70, IL-15, IL-18, IL-21, and IL-23.
[2168] 242. The method of embodiment 240, wherein the interleukin is selected from the group consisting of IL-12 p35, IL-12 p40, and IL-12 p70.
[2169] 243. The method of any one of embodiments 240-242, wherein the interleukin is membrane-bound.
[2170] 244. The method of any one of embodiments 230-243, wherein the method further comprises administering to the mammalian patient an interferon.
[2171] 245. The method of embodiment 244, wherein the interferon is selected from the group consisting of IFN-alpha, IFN-beta, IFN-delta, IFN-epsilon, IFN-tau, IFN-omega, IFN-zeta, and IFN-gamma.
[2172] 246. The method of any one of embodiments 230-245, wherein the method further comprises administering to the mammalian patient a cytokine.
[2173] 247. The method of embodiment 246, wherein the cytokine is a TNF superfamily member protein.
[2174] 248. The method of embodiment 247, wherein the TNF superfamily member protein is selected from the group consisting of TRAIL, Fas ligand, LIGHT (TNFSF-14), TNF-alpha, and 4-1BB ligand.
[2175] 249. The method of embodiment 246, wherein the cytokine is selected from the group consisting of GM-CSF, Flt3 ligand, CD40 ligand, TGF-beta, VEGF-R2, and cKit.
[2176] 250. The method of embodiment 246, wherein the cytokine is Flt3 ligand.

### 5.8. Tables 3-45 Referenced in the Application

Lengthy table referenced here
US20220056480A1-20220224-T00001
Please refer to the end of the specification for access instructions.

Lengthy table referenced here
US20220056480A1-20220224-T00002
Please refer to the end of the specification for access instructions.

Lengthy table referenced here
US20220056480A1-20220224-T00003
Please refer to the end of the specification for access instructions.

Lengthy table referenced here
US20220056480A1-20220224-T00004
Please refer to the end of the specification for access instructions.

Lengthy table referenced here
US20220056480A1-20220224-T00005
Please refer to the end of the specification for access instructions.

Lengthy table referenced here
US20220056480A1-20220224-T00006
Please refer to the end of the specification for access instructions.

Lengthy table referenced here
US20220056480A1-20220224-T00007
Please refer to the end of the specification for access instructions.

Lengthy table referenced here
US20220056480A1-20220224-T00008
Please refer to the end of the specification for access instructions.

Lengthy table referenced here
US20220056480A1-20220224-T00009
Please refer to the end of the specification for access instructions.

Lengthy table referenced here
US20220056480A1-20220224-T00010
Please refer to the end of the specification for access instructions.

Lengthy table referenced here
US20220056480A1-20220224-T00011
Please refer to the end of the specification for access instructions.

Lengthy table referenced here
US20220056480A1-20220224-T00012
Please refer to the end of the specification for access instructions.

Lengthy table referenced here
US20220056480A1-20220224-T00013
Please refer to the end of the specification for access instructions.

Lengthy table referenced here
US20220056480A1-20220224-T00014
Please refer to the end of the specification for access instructions.

Lengthy table referenced here
US20220056480A1-20220224-T00015
Please refer to the end of the specification for access instructions.

Lengthy table referenced here
US20220056480A1-20220224-T00016
Please refer to the end of the specification for access instructions.

Lengthy table referenced here
US20220056480A1-20220224-T00017
Please refer to the end of the specification for access instructions.

Lengthy table referenced here
US20220056480A1-20220224-T00018
Please refer to the end of the specification for access instructions.

Lengthy table referenced here
US20220056480A1-20220224-T00019
Please refer to the end of the specification for access instructions.

Lengthy table referenced here
US20220056480A1-20220224-T00020
Please refer to the end of the specification for access instructions.

Lengthy table referenced here
US20220056480A1-20220224-T00021
Please refer to the end of the specification for access instructions.

Lengthy table referenced here
US20220056480A1-20220224-T00022
Please refer to the end of the specification for access instructions.

Lengthy table referenced here
US20220056480A1-20220224-T00023
Please refer to the end of the specification for access instructions.

Lengthy table referenced here
US20220056480A1-20220224-T00024
Please refer to the end of the specification for access instructions.

Lengthy table referenced here
US20220056480A1-20220224-T00025
Please refer to the end of the specification for access instructions.

Lengthy table referenced here
US20220056480A1-20220224-T00026
Please refer to the end of the specification for access instructions.

Lengthy table referenced here
US20220056480A1-20220224-T00027
Please refer to the end of the specification for access instructions.

Lengthy table referenced here
US20220056480A1-20220224-T00028
Please refer to the end of the specification for access instructions.

Lengthy table referenced here
US20220056480A1-20220224-T00029
Please refer to the end of the specification for access instructions.

Lengthy table referenced here
US20220056480A1-20220224-T00030
Please refer to the end of the specification for access instructions.

Lengthy table referenced here
US20220056480A1-20220224-T00031
Please refer to the end of the specification for access instructions.

Lengthy table referenced here
US20220056480A1-20220224-T00032
Please refer to the end of the specification for access instructions.

Lengthy table referenced here
US20220056480A1-20220224-T00033
Please refer to the end of the specification for access instructions.

Lengthy table referenced here
US20220056480A1-20220224-T00034
Please refer to the end of the specification for access instructions.

Lengthy table referenced here
US20220056480A1-20220224-T00035
Please refer to the end of the specification for access instructions.

Lengthy table referenced here
US20220056480A1-20220224-T00036
Please refer to the end of the specification for access instructions.

Lengthy table referenced here
US20220056480A1-20220224-T00037
Please refer to the end of the specification for access instructions.

Lengthy table referenced here
US20220056480A1-20220224-T00038
Please refer to the end of the specification for access instructions.

Lengthy table referenced here
US20220056480A1-20220224-T00039
Please refer to the end of the specification for access instructions.

Lengthy table referenced here
US20220056480A1-20220224-T00040
Please refer to the end of the specification for access instructions.

Lengthy table referenced here
US20220056480A1-20220224-T00041
Please refer to the end of the specification for access instructions.

Lengthy table referenced here
US20220056480A1-20220224-T00042
Please refer to the end of the specification for access instructions.

Lengthy table referenced here
US20220056480A1-20220224-T00043
Please refer to the end of the specification for access instructions.

Lengthy table referenced here
US20220056480A1-20220224-T00044
Please refer to the end of the specification for access instructions.

### 6. EXAMPLES

[2178] The following examples are put forth so as to provide those of ordinary skill in the art with a description of how the compositions and methods claimed herein are performed, made, and evaluated, and are intended to be purely exemplary of the invention and are not intended to limit the scope of what the inventor regards as her invention.

### 6.1. Example 1

### Discovery of OncoVac

[2179] The open reading frames (ORFs) from 59 poxvirus strains were clustered into orthologs and aligned at the amino acid level (see FIG. 1 for phylogenetic analysis). Bayesian analysis was performed to determine relatedness of all strains. Poxviruses are very diverse in gene content and host range. There are several naturally occurring Vaccinia wild-type strains which are different from one another.

[2180] FIG. 33 shows the percentage of genes deleted in CopMD5p3p (Table 2) in various poxvirus genomes. Each dot on the graph represents one poxvirus genome. Homology searches were used to query poxviruses from other clades with amino acid sequences of Table 2 genes from the Copenhagen genome. The amount of deleted genes present in other pox viruses decreases with their increasing divergence.

[2181] Vaccinia wild type strains were mixed at equal plaque forming unit counts and sequenced with NGS (Input pool). The resulting mixture was passaged three times in different cancer cell lines. The final population was sequenced with Illumina NGS sequencing. Reads (short DNA fragments) were assigned to various strains based on sequence identity and used to calculate the percent of each strain in the final population. The abundance of different viral strains after passaging 5 Vaccinia viruses in different tumor types is shown in FIG. 2. The Copenhagen strain is able to outgrow other strains and therefore replicates faster.

[2182] Different Vaccinia wild type strains were also used to infect at low PFU (1×10⁴) various patient tumor cores. Each strain infected on average 4 replicates each containing three 2×2 mm tumor cores. Replication was assessed through virus titering and is expressed as plaque forming units (PFU) as shown in FIG. 3. The Copenhagen strain grows to higher titres than other strains and therefore replicates faster in patient ex-vivo samples. Patient ex-vivo cores are a good mimic of a patient's 3D tumor.

[2183] Vaccinia wild-type strains were then subjected to a plaque assay on U2-OS cells with a 3% CMC overlay. Two days past infection, 20-30 plaques for each strain were measured for their size. Plaque size measurements for Copenhagen, Western Reserve, Wyeth, Lister, and Tian Tan are shown in FIG. 4. Plaque formation is affected by the ability of the virus to replicate, spread, and kill. The larger plaque sizes observed for the Copenhagen strain suggest that this strain is superior in these abilities which are important for the development of an oncolytic virus.

[2184] Finally, all 59 poxvirus genomes from FIG. 1 were used to find ORFs and clustered into orthologous groups. Groups containing Copenhagen genes were plotted based on location of the gene in the Copenhagen genome (x-axis) and size of the group (y-axis). When all 59 species share the same gene the conservation is considered to be 100%. Genes that are part of the major deletions CopMD5p and CopMD3p were found to be less important for viral replication as their deletion does not impact fitness.

[2185] A novel phenotype has been discovered by deleting the previously uncharacterized A47L gene. Deleting A47L induces the Copenhagen virus to create larger plaques

[2186] Illumina NGS deep sequencing revealed presence of major deletions during the plaque purification process. CopMD5p and CopMD3p represent clones which were plaque purified and found to harbor major genomic deletions. These 2 clones were used to co-infect a monolayer of HeLa cells at a high MOI (MOI 10) to induce recombination. Random plaque picking and PCR revealed presence of a double deleted CopMD5p3p which contained both genome deletions (see FIG. 5). Thus, two naturally occurring deletions in the wild-type Copenhagen population were discovered. These 2 deletions were combined and purified to give a replicating virus, referred to herein as “CopMD5p3p”, that exhibits deletions in the C2L, C1L, N1L, N2L, M1L, M2L, K1L, K2L, K3L, K4L, K5L, K6L, K7R, F1L, F2L, F3L, B14R, B15R, B16R, B17L, B18R, B19R, and B20R genes, as well as deletions in each of the B21R, B22R, B23R, B24R, B25R, B26R, B27R, B28R, and B29R copies of ITRs. As used herein, “CopWT” refers to wild-type Copenhagen vaccinia virus, “CopMD5p” refers to a Copenhagen vaccinia virus harboring deletions in representative 5′ genes (C2L, C1L, N1L, N2L, M1L, M2L, K1L, K2L, K3L, K4L, K5L, K6L, K7R, F1L, F2L, and F3L), and “CopMD3p” refers to a Copenhagen vaccinia virus harboring deletions in representative 3′ genes (B14R, B15R, B16R, B17L, B18R, B19R, and B20R) as well as deletions in each of the B21R, B22R, B23R, B24R, B25R, B26R, B27R, B28R, and B29R copies of ITRs.

### 6.2. Example 2

### Cancer Cell Death

[2187] Cancer cells were infected with CopMD5p3p at a range of MOIs (1 to 0.01) in 24-well plates in 4 replicates. Two days post infection with virus, plates were stained with crystal violet. Crystal violet stain was dissolved into SDS and read by spectrophotometry. Data is represented as percent absorbance of non-infected cells (see FIG. 6). This data shows that the majority of cancer cell lines die faster when exposed to the CopMD5p3p virus.

[2188] The ability of wild-type Copenhagen vaccinia virus and several modified Copenhagen vaccinia virions to induce an anti-tumor immune response and to propagate in various cancer cell lines is also shown in FIGS. 23, 24 and 26-32.

### 6.3. Example 3

### Growth in Cancer Cells

[2189] Four cancer cell lines were infected with CopMD5p3p at a low MOI (0.001) in 24-well plates in triplicates, and at different time points, the virus was collected and tittered. Time 0 h represents input. The growth curves of HeLa, 786-O, HT-29, and MCF7 are shown in FIG. 7. This data shows that the modified CopMD5p3p virus is not impaired in its ability to grow in vitro. This means that the virus is replication competent, even in presence of interferon response. The ability to replicate in mammalian cell lines provides another important advantage. As such viruses may be manufactured with enhanced speed and efficiency.

### 6.4. Example 4

### Growth in Patient Tumor Samples

[2190] Patient tumor samples were obtained immediately after surgery and cut into 2 mm×2 mm cores. Three cores were infected with a small amount of virus (1×10 ⁴ PFU), either wild-type Copenhagen or CopMD5p3p. After 72 h virus output was assessed by plaque assay and final Viral Titer expressed as PFU (see FIG. 8). This data shows that the modified CopMD5p3p virus can replicate in fresh patient tumor samples. Replication in patient tumor samples is a good model of replication in a patient 3D tumor.

### 6.5. Example 5

### Cyncytia in U2-OS Cells

[2191] Monolayers of U2-OS cells were infected with either Copenhagen wild-type or CopMD5p3p virus. After 2h, the media was changed for overlay media as done for a plaque assay. At 48 h post infection, pictures were taken with EVOS to assess plaque phenotype (see FIG. 9). Cell fusion, also known as syncytia, is thought to help the virus spread, since uninfected cells merge with infected cells. Additionally, it has been shown that fused cells are immunogenic and in the case of cancer cells can help initiate an anti-tumor immune response.

### 6.6. Example 6

### Syncytia in 786-O Cells

[2192] Monolayers of 786-O cells were infected with either Copenhagen wild-type or CopMD5p3p virus. After 24 h pictures were taken with EVOS at 10× magnification (see FIG. 10). This is additional evidence for the occurrence of syncytia. In FIG. 9, the phenotype of a plaque is shown. In the current experiment, monolayers of cells were infected without overlay. Most cells infected by the CopMD5p3p virus have fused.

### 6.7. Example 7

### Tumor Control and Weight Loss in Mouse Model

[2193] Nude CD-1 mice were seeded with HT-29 human colon cancer xenograft. Once subcutaneous tumors have established an approximate 5 mm×5 mm size, mice were treated three times (dashed lines) 24 h apart with 1×10⁷ PFU of either vaccinia virus intravenously. Mice were measured approximately every other day for tumor size and weight loss (see FIG. 11). This experiment shows that CopMD5p3p is a much safer virus because it does not cause any weight loss or other signs of sickness in immunocompromised nude mice. This experiment also shows CopMD5p3p is able to control tumor growth similarly to the parental Copenhagen wild-type virus.

### 6.8. Example 8

### Pox Lesion Formation

[2194] Nude CD-1 mice were treated once with 1×10⁷ PFU of either vaccinia virus intravenously, six mice per group. Two weeks post treatment, mice were sacrificed and pictures of tails were taken. Pox lesions on tails were counted manually on every mouse tail. Representative pictures shown in FIG. 12. This experiment shows that CopMD5p3p is a much safer virus because it does not cause any pox lesions in immunocompromised nude mice. This is important since prior Oncolytic Vaccinia clinical data has shown patients developing pox lesions upon treatment. Knockout of thymidine kinase (TK) is a popular way of increasing the safety of an OV (oncolytic virus), currently present in a Phase III Oncolytic Vaccinia and in FDA approved Oncolytic T-Vec. The data shows that deleting TK does not play a crucial role in this assay, where mice develop pox lesions when challenged with TK deleted viruses, but do not develop pox lesions with CopMD5p3p which has an intact TK.

### 6.9. Example 9

### IVIS Bio-Distribution of Vaccinia after Systemic Administration

[2195] Vaccinia viruses wild-type Wyeth, wild-type Copenhagen, and CopMD5p3p were engineered to express Firefly Luciferase (Fluc) through transfection of infected cells with a pSEM1 plasmid replacing TK with Fluc. Viruses were plaque purified and expanded. All viruses are TK knockouts and encode functional Fluc in their TK locus.

[2196] Nude CD-1 mice were then seeded with HT-29 human colon cancer xenograft. Once subcutaneous tumors have established an approximate 5 mm×5 mm size, mice were treated once with 1e7 PFU of either vaccinia Fluc encoding virus intravenously, four mice per group. Four days post treatment, mice were injected i.p. (intraperitoneal) with luciferin and imaged with IVIS for presence of virus (see FIG. 13). This experiment shows that CopMD5p3p is a much safer virus because it is more specific to the tumor. Other viruses show off target replication in the tail, muscle, paws and intra-nasal cavity. CopMD5p3p is only localized in the tumor. As shown in previous FIGS. 12 and 13, there is less detectable CopMD5p3p in the tail compared to the other strains. FIG. 14 shows that CopMD5p3p also has lower titers in other organs when compared to other oncolytic Vaccinia. Since the CopMD5p3p replicates at the same level as the other viruses in the tumor but less in off-target tissues, CopMD5p3p fits the profile of an oncolytic virus better.

[2197] An additional example of the biodistribution of various vaccinia viral vectors, including the wild-type Copenhagen vaccinia virus and several modified Copenhagen vaccinia virions, is shown in FIG. 25.

### 6.10. Example 10

### Immunogenicity of Vaccinia in Human PBMCs

[2198] PBMCs were isolated from blood of healthy human donors (n=2). PBMCs were incubated with either Vaccinia for 24 h and checked for early activation markers using Flow Cytometry (see FIG. 15). This experiment shows that CopMD5p3p is more immunogenic and more readily detectable by immune cells. We believe that this is a desirable trait, since OVs replicating in tumor tissue need to activate immune cells for a successful anti-tumor immune response.

### 6.11. Example 11

### Immunogenicity of Vaccinia in Mouse Splenocytes

[2199] Immune competent Balb/C mice were injected with 1e7 Vaccinia PFU Vaccinia virus intravenously. After one or two days, mice were sacrificed, spleens were harvested and analyzed for immune activation using Flow Cytometry (see FIG. 16). This experiment shows that CopMD5p3p is more immunogenic and more readily detectable by mouse immune cells. This data complements nicely the previous FIG. 15, since most of the in vivo experiments are done in mice.

### 6.12. Example 12

### Immunogenicity of Vaccinia in Human Cells

[2200] Human cancer cells 786-O were infected at an MOI of 0.01 with either virus. The next day, cells were harvested and nuclei and cytoplasm were separated by cell fractionation. Protein was extracted from each fraction and blotted for NF-kB subunits p65 and p50 (see FIG. 17). NF-kB immune transcription factor initiated an immune response once its subunit p65 and p50 are translocated to the nucleus. Some viruses are immunosuppressive and block this translocation, preventing an immune response. Suppressing NF-kB function is counter-intuitive to the goal of using oncolytic viruses in combination with immunotherapeutic approaches. Thus, CopMD5p3p is a more advantageous virus as it behaves similarly to MG-1.

### 6.13. Example 13

### Synergy with Immune Checkpoint Inhibitor Anti-CTLA-4 Antibody in Aggressive Melanoma Model

[2201] Immune competent C57BL/6 mice were seeded (5×10⁵ cells) subcutaneously with B16-F10 melanoma tumors. Treatment began once subcutaneous tumors have established an approximate 5 mm×5 mm size. Mice treated with CopMD5p3p virus received three 1e7 PFU doses into the tumor (intra-tumor) one day apart. Mice treated with Anti-CTLA-4 received five 100 ug doses of antibody i.p. one day apart. Survival were recorded every other day once treatment started (see FIG. 18). In this experiment we tested if the oncolytic effect of our CopMD5p3p virus can synergize with a well-known checkpoint inhibitor CTLA-4 in a very aggressive melanoma murine model. The median survival of mice treated with virus and checkpoint was higher than any other group. This suggests that CopMD5p3p has some stimulating properties that synergize with checkpoint blockade immunotherapy.

### 6.14. Example 14

### Synergy with Immune Checkpoint Inhibitor Anti-CTLA-4 Antibody

[2202] Immune competent Balb/C mice were seeded (5×10⁵ cells) subcutaneously with CT26-LacZ tumors. Treatment began once subcutaneous tumors have established an approximate 5 mm×5 mm size. Mice treated with Vaccinia virus received three (24 h apart, first three dashed lines) 1e7 PFU doses into the tumour (intra-tumor). Mice treated with Anti-CTLA-4 received five (24 h apart, dashed lines) 100 ug doses of antibody i.p. Tumor size and survival were recorded every other day once treatment started (see FIG. 19). The data shows that a TK knockout Vaccinia virus does not work as well with Anti-CTLA-4 as does CopMD5p3p. This suggests CopMD5p3p is more immunogenic and more capable of generating an anti-tumour immune response.

### 6.15. Example 15

### Synergy with Immune Checkpoint Inhibitor Anti-PD1 Antibody

[2203] Immune competent Balb/C mice were seeded (5×10⁵ cells) subcutaneously with CT26-LacZ tumors. Treatment began once subcutaneous tumors have established an approximate 5 mm×5 mm size. Mice treated with Vaccinia virus received three (24 h apart, first three dashed lines) 1e7 PFU doses into the tumor (intra-tumor). Mice treated with Anti-PD1 received five (24 h apart, last five dashed lines) 100 ug doses of antibody i.p. 24 h after the last dose of Vaccinia virus. Tumor size and survival were recorded every other day once treatment started (see FIG. 20). The data shows that a TK knockout Vaccinia virus does not work as well with Anti-PD1 as does CopMD5p3p. This suggests CopMD5p3p is more immunogenic and more capable of generating an anti-tumor immune response.

### 6.16. Example 16

### Synergy with Immune Checkpoint Inhibitor Anti-PD1 Antibody and Anti-CTLA-4 Antibody

[2204] Immune competent Balb/C mice were seeded (5×10⁵ cells) subcutaneously with CT26-LacZ tumors. Treatment began once subcutaneous tumors have established an approximate 5 mm×5 mm size. Mice treated with Vaccinia virus received three (24 h apart, first three dashed lines) 1e7 PFU doses into the tumor (intra-tumor). Mice treated with Anti-CTLA-4 received five (24 h apart, first five dashed lines) 100 ug doses of antibody i.p. Mice treated with Anti-PD1 received five (24 h apart, last five dashed lines) 100 μg doses of antibody i.p. 24 h after the last dose of Vaccinia virus. Tumor size and survival were recorded every other day once treatment started (see FIG. 21). In this experiment we tested whether a lower dose (25 μg instead of 100 μg) of checkpoint inhibitor antibody could work if we blocked both checkpoints simultaneously. The CopMD5p3p still managed to achieve cures in this murine model with a lower dose (50 μg total) of checkpoints. Since checkpoint inhibitors have dose dependent toxicity, it is advantageous that very small doses of checkpoint blockers can still achieve an observable phenotype. As in other experiments, the CopMD5p3p virus manages to cure established tumors, and this effect is not observed with wild-type virus lacking the corresponding deletions of CopMD5p3p.

### 6.17. Example 17

### Administration for the Treatment of a Subject

[2205] Using the methods described herein, a clinician of skill in the art can administer to a subject (e.g., a patient) a pharmaceutical composition containing a recombinant orthopoxvirus vector described herein to treat cancer or tumor cells. The cancer may be, for example, leukemia, lymphoma, liver cancer, bone cancer, lung cancer, brain cancer, bladder cancer, gastrointestinal cancer, breast cancer, cardiac cancer, cervical cancer, uterine cancer, head and neck cancer, gallbladder cancer, laryngeal cancer, lip and oral cavity cancer, ocular cancer, melanoma, pancreatic cancer, prostate cancer, colorectal cancer, testicular cancer, or throat cancer, among others.

[2206] For instance, a clinician of skill in the art may assess that a patient is suffering from cancer or tumors and may administer to the patient a therapeutically effective amount (e.g., an amount sufficient to decrease the size of the tumor) of a pharmaceutical composition containing the recombinant orthopoxvirus vector disclosed herein. The pharmaceutical composition may be administered to the subject in one or more doses (e.g., 1, 2, 3, 4, 5, 6, 7, 8, 9, 10, 15, 20, 25, or more) per a specified time interval (e.g., weekly, daily, or hourly). The patient may be evaluated between doses to monitor the effectiveness of the therapy and to increase or decrease the dosage based on the patient's response. The pharmaceutical composition may be administered to the patient orally, parenterally (e.g., topically), intravenously, intramuscularly, subcutaneously, or intranasally. The treatment may involve a single dosing of the pharmaceutical composition. The treatment may involve continued dosing of the pharmaceutical composition (e.g., days, weeks, months, or years). The treatment may further involve the use of another therapeutic agent (e.g., an immune checkpoint inhibitor, such as an anti-PD-1 or anti-CTLA-4 antibody or antigen-binding fragment thereof, IL-12, or Flt3 ligand, among other agents).

### 6.18. Example 18

### Targeted Deletions of CopMD5p and CopMD3p in Several Vaccinia Strains

[2207] The following protocol for producing modified vaccinia viral vectors utilizes techniques described, e.g., in Rintoul et al. PLoS One. 6(9): e24643 (2011), the disclosure of which is incorporated herein by reference.

[2208] Briefly, CopMD5p (Copenhagen vaccinia virus harboring deletions in 5′ genes: (the C2L, C1L, N1L, N2L, M1L, M2L, K1L, K2L, K3L, K4L, K5L, K6L, K7R, F1L, F2L, and F3L genes) and CopMd3p (Copenhagen vaccinia virus harboring deletions in 3′ genes: the B14R, B15R, B16R, B17L, B18R, B19R, and B20R genes) targeting recombinant constructs were synthesized by g-Block technology (IDT, Coralville Iowa). U2OS cells were infected with wildtype vaccinia virus (Wyeth, Western Reserve, Tian Tan, Lister) at an MOI of 0.01 in serum free DMEM for 1.5 hours. Viral supernatant was aspirated and U2OS cells were transfected with PCR amplified CopMD5p or CopMD3p targeting g-Blocks by Lipofectamine 2000 (Invitrogen) in OptiMEM (Gibco). DMEM supplemented with 10% FBS was added to cells 30 minutes after transfection and left overnight. The following day, transfection media was aspirated and fresh DMEM 10% FBS media was added to cells. 48 hours after infection transfection, U2OS cells were harvested and lysed by a single freeze thaw cycle. Serially diluted lysates were plated onto a confluent monolayer of U2OS cells and eGFP positive (CopMD5p targeted) or mCherry positive (CopMD3p targeted) plaques were isolated and purified through 5 rounds of plaque purifications.

[2209] Double major deleted vaccinia viruses were generated by co-infection of CopMD5p and CopMD3p deleted vaccinia viruses at an MOI of 5 for each virus in U2OS cells. Cells were harvested the next day and lysed by one round of freeze thaw. Lysates were serially diluted and plated onto a confluent monolayer of U2OS cells and selected for double positive plaques (eGFP+mCherry). Plaques were purified by 5 rounds of plaque purification.

[2210] An exemplary scheme for the production of modified orthopoxvirus vectors (e.g., modified vaccinia viral vectors, such as modified Copenhagen vaccinia viral vectors) of the disclosure is shown in FIG. 22.

### 6.19. Example 19

### SKV (CopMD5p3p-B8R-) has Similar Efficacy in Tumour Control Compared to SKV-B8R+

[2211] The vaccinia virus (VV) B8R gene encodes a secreted protein with homology to gamma interferon receptor (IFN-γ). In vitro, the B8R protein binds to and neutralizes the antiviral activity of several species of gamma interferon including human and rat gamma interferon; it does not, however, bind significantly to murine IFN-γ. Here we describe the construction and characterization of recombinant VVs lacking the B8R gene. Homologous recombination between the targeting construct and the B8R locus resulted in the replacement of 75% of the B8R gene with the eGFP transgenes flanked by two loxP sites (SKV-GFP).

[2212] B8R-viruses showed similar efficacy to B8R+viruses. FIG. 37. Survival of mice treated with either SKV or SKV-GFP was assessed. 5×10⁵ CT26-LacZ cells were seeded subcutaneously on day 0. On day 14, 16 and 18 tumors were treated at a dose of 10⁷ pfu with an intratumoural injection of either SKV or SKV-GFP. No significant decrease in efficacy was seen when the viruses injected had a deletion of the B8R locus.

### 6.20. Example 20

### Infection of Normal Versus Cancer Cell Lines of SKV-B8R+Virus

[2213] Primary health cell viability was compared to that of cancer cells. Confluent normal or cancer cells were infected at a range of MOI (pfu/cell) for 48 hrs, after which viability was quantified. As indicated in FIG. 34, SKV-B8R+virus preferentially infects cancer cells.

### 6.21. Example 21

### SKV-B8R+does not Impair Interferon Signaling

[2214] Interferon signaling was assessed by determining the number of genes in the interferon pathway that are unregulated (induced expression) or downregulated (repressed expression) in a variety of normal cell lines and one cancer cell line (786-O). FIG. 35 Confluent monolayers of 1 million cells were infected at an MOI of 3 (3e6 PFU) for 18 h with either SKV-B8R+ (CopMD5p3p) or the parental Copenhagen virus having the TK gene disabled. RNA was sequenced using RNA-seq and gene expression of interferon genes was determined after read mapping and expression normalization. While the SKV-B8R+ (CopMD5p3p) virus mostly induces genes in the interferon pathway the parental Copenhagen represses genes. This suggests SKV-B8R+ (CopMD5p3p) is able to induce Type I Interferon signaling which is critical in viral clearance of normal cells.

### 6.22. Example 22

### B8R Negative Vaccinia Virus Engineered to Express Flt3L, IL-12 TM and anti-hCTLA-4

[2215] Modified vaccinia viruses containing both the CopMD5p3p and B8R deletions, as described above, were further engineered to express the immunotherapeutic transgenes, Flt3L and IL-12-TM, as well as an antibody to hCTLA-4, as shown in FIG. 38. The Flt3L, IL-12 TM and eGFP transgenes were inserted into the B8R locus on the Copenhagen vaccinia virus genome. See FIG. 36. Homologous recombination between the targeting construct and the B8R locus resulted in the replacement of 75% of the B8R gene with the Flt3-LG, IL-12-TM and eGFP transgenes (SKV-23). This strategy allowed the creation of a B8R knockout virus while inserting transgenes in lieu of B8R. The anti-CTLA-4 IgG was inserted into the SKV-23 backbone by targeting the boundaries of the 5p deletions to insert a heavy and light chain of a human anti-CTLA-4 antibody separated by a T2A proteomic motif (SKV-123v2; see FIG. 38).

[2216] Ability of these engineered viruses to express the membrane bound IL-12 transgene was assessed. Cells were infected with SKV-1sc23, SKV-3 or SKV-GFP engineered vaccinia genes. As depicted in FIG. 42, Vero cells were stained with an IL-12p35 specific antibody. Vero cells were co-labelled with wheat germ agglutinin (WGA) conjugated flouorophore as a counterstain to visualize the cell membrane specific staining patterns. hIL-12 production was further quantified for various SKV viruses expressing transgenes through western blot quantification. See FIG. 41. Monolayers of 1×10⁶ HeLa cells were infected at MOI 0.1 (1×10⁵ pfu) with various Vaccinia SKV expressing different combinations of the three transgenes (anti-hCTLA-4, FTL3L, IL-12). After 48 h post infection, supernatant and lysate were collected and probed for expression of IL-12 p35 subunit. SKV-123 and SKV-3, both viruses engineered to express IL-12 p35 subunit with a transmembrane domain only express the protein on lysate fractions, suggesting the IL-12 does not get secreted into the supernatant.

[2217] Expression levels of anti-hCTLA-4 and hFLT3L were measured using an ELISA protocol. Monolayers of le6 HeLa cells were infected at MOI 0.1 (1×10⁵ pfu) with SKV-123 expressing all three transgenes. 48 hours post infection, the supernatant was collected and assayed via ELISA for expression of the human anti CTLA-4 antibody and the Flt3 ligand. As depicted in FIG. 40, the SKV-123 virus was capable of producing more antibody against CTLA-4 than Flt3 ligand soluble protein.

[2218] The SKV-123 virus expressing all three transgenes was evaluated in terms of transgene expression kinetics overtime (FIG. 39). Confluent monolayers of 786-O human adenocarcinoma cell lines were infected with SKV-123 virus at an MOI of 3 (3×10⁶ pfu). RNA was sequenced using RNA-seq and gene expression of inserted transgenes were determined after read mapping and expression normalization. The data suggest that transgene expression peaks at 3-4 hr. after cell infection occurs.

[2219] In a separate experiment, expression of the three transgenes from the SKV-123v2 virus was further evaluated in three other cancer cell lines: HeLa human cervical cancer cells (American Type Culture Collection (ATCC) Cat. #: CCL-2), HT-29 human colorectal cancer cells (ATCC Cat. #: HTB-38), and CT26.WT murine colorectal cancer cells (ATCC Cat. #: CRL-2638). SKV-123 virus infection at MOIs of 0.1 or 1.0 resulted in CTLA-4 antibody, FLT3L, and IL-12 transgene product production in each of the HeLa, HT-29, and CT26.WT cancer cells (FIGS. 56-59).

### 6.23. Example 23

### SKV Expressing Murine IL-12 p35 Membrane Bound has Greater Efficacy in Controlling Murine Tumors

[2220] The survival of mice treated with either SKV or SKV-3 virus (expressing murine membrane bound p35 IL-12) was assessed. 5e6 CT26-LacZ cells were seeded subcutaneously on day 0. On days 14, 16 and 18, tumors were treated at a dose of 1e7 pfu with an intratumoural injection of either SKV or SKV-3. Although SKV virus extended survival of mice bearing CT26 colon tumors, SKV-3 expression of IL-12 is able to induce remissions that lead to durable cures. See FIG. 43.

### 6.24. Example 24

### Major Double Deletions in Engineered in Various Vaccinia Strains Enhance Cancer Cell Killing In Vitro

[2221] Hela cells were infected at an MOI of 0.1 with the following strains of engineered vaccinia viruses: (1) parental wildtype virus (wt); (2) 5 prime major deleted (5p), (3) 3 prime major deleted (3p), and (4) recombined 5 prime and 3 prime major double deleted (5p3p). Cell viability was quantified by alamar blue assay 72 hours post infection. Both 5p and 5p3p major double deleted vaccinia strains are more cytotoxic in HeLa cells when compared to their parental wildtype and 3p major deleted strains. See FIGS. 44-47.

### 6.25. Example 25

### Efficacy of SKV on Tumor Volume and Survival Benefit in 8 Different Xenograft Mouse Models

[2222] The objective of these efficacy studies was to determine the anticancer activity of the modified vaccinia viruses comprising both the CopMD5p3p and B8R deletions (SKV) injected intravenously (IV) and/or intratumorally (IT) in athymic nude mice implanted subcutaneously (SC) with either Mia PaCa-2 human pancreatic tumor cells, PC-3 human prostate tumor cells, U87MG human glioma cells, UACC-62 human melanoma cells, UM-UC-3 human bladder tumor cells, COLO-205 human colon tumor cells, NCI-H460 human lung tumor cells or HT29 human colon adenocarcinoma cells.

[2223] Cells were cultured and when the required number of cells were obtained, a total of 45 female, 6-8 week old athymic nude mice were inoculated with tumor cells (Day 0). Each mouse was injected SC in the right flank with ten million cells (1×10⁷ cells) in 0.2 mL of 1:1 Matrigel™. When 25 mice had tumors of approximately 100 to 200 mg (target group mean tumor weight of approximately 200 mg), treatment with Vaccinia virus was started.

[2224] The mice were administered 0.05 ml SKV (dose 1e7 pfu) either IT (10 mice) and/or IV (10 mice). Controls (5 mice) were administered 0.05 ml PBS. For IT injections, a 31G ½″ needle attached to a sterile syringe was used to inject each tumor. If the tumor was large or irregularly shaped, the tumor was injected in a different area on each day of injection. Mice were observed twice daily for mortality and moribundity. Tumors were measured twice a week starting on first day of treatment. Tumor volumes (mm³) were calculated using the equation for an ellipsoid sphere (l×w²)/2=mm³, where/and w refer to the larger and smaller dimensions collected at each measurement.

[2225] On Day 60 after tumor implantation or earlier, any moribund animal, any animal with excessive body weight loss (>30% of the body weight from first day of treatment) or any animal whose total tumor burden reached 4,000 mg, was ulcerated, or was sloughed off was removed from the study.

[2226] These efficacy studies showed a measurable reduction in tumor volume in the Mia PaCa-2, PC-3, U87MG, UACC-62 and UM-UC-3 xenograft models when a dose of 1e7 pfu SKV was administered IV or IT, as shown in FIGS. 48A-48E as well as in COLO-205, H460 and HT29 xenograft models when a dose of 1e7 pfu SKV was administered IT, as shown in FIGS. 48F-48H. These efficacy studies also showed a significant increase in percent survival (p<0.0001) in the all 8 xenograft models when administered with SKV IV and/or IT compared to control mice treated with PBS alone, as shown in FIGS. 48A-48H.

### 6.26. Example 26

### Efficacy of Various SKV Vectors on Tumor Volume and Survival Benefit in a Syngeneic Mouse Model

[2227] A number of SKV vectors were generated (see Tables 44 and 45 above). The purpose of this study was to compare the efficacy of SKV-12m3v2-eGFP, ipilimumab and SKV in a syngeneic mouse model where all encoded transgenes were active. MC38 colorectal cancer cells (5×10⁵) were re-suspended in 100 μl of 1:1 mixture of Matrigel and serum free DMEM media were injected SC into the right flank of transgenic C57BL/6 mouse expressing human CTLA-4. Animals were then randomized into 5 treatment groups and then treated with PBS, PBS plus ipilimumab, SKV, anti-PD-1 antibody, SKV-12m3v2-eGFP or SKV-12m3v2-eGFP plus anti-PD-1 antibody. SKV-12m3v2-eGFP is SKV expressing the human anti-CTLA-4 antibody, human Flt3 ligand and mouse IL-12 TM p35. Virus was diluted in PBS to deliver 1×10⁸ PFU/mouse in 50 μl and then total volume injected into the center of the tumor creating a single needle track. Antibodies (ipilimumab 20 μg in 100 μl and anti-PD-1 antibody 250 μg in 100 μl) were diluted in sterile PBS to appropriate dose and delivered by ip injection. Mice bearing SC MC38 tumors were treated with 3 doses of either a) ipilimumab at 1 mg/kg, b) SKV at 1×10⁸ PFU or c) SKV-12m3v2-eGFP at 1×10⁸ PFU. Tumors were measured, volumes recorded and basic wellness assessed prior to treatment and then over the course of the study (21 days duration). Results from the study are shown in FIG. 49 (average tumor volume and survival curves) and FIG. 50 (individual tumor volumes). Ipilimumab alone resulted in delayed tumor growth and 1 cure (10%); SKV alone showed efficacy and 2 cures (20%); SKV expressing the three transgenes significantly improved tumor control, increased survival, and resulted in 3 cures (30%); addition of PD-1 antibody doubled the cure rate (30-60%); and PD-1 antibody alone had no effect (data not shown).

[2228] Tumor control, as compared to the PBS-treated group at the time of the first humane endpoint on study, was observed in response to treatment with ipilimumab (P<0.05), SKV (P<0.05), SKV-12m3v2-eGFP (P<0.05), and SKV-12m3v2-eGFP +anti-PD-1 antibody (P<0.05). There was no statistically significant difference in tumor control between the different viruses or with the addition of anti-PD-1 antibody. All statistical tests were performed using multiple t-tests with GraphPad Prism 8.2.

[2229] Increased survival time compared to the PBS-treated group (median survival 19 days) was observed with treatment with SKV (P<0.005, median survival 20=5 days, Ipilimumab (P<0.001, median survival 30 days), SKV-12m3v2-eGFP (P<0.001, median survival 33 days), and SKV-12m3v2-eGFP +anti-PD-1 antibody (P<0.001). Complete tumor regression was observed in the following treatment groups: Ipilimumab (n=1), SKV (n=2), SKV-12m3v2-eGFP (n=3) and SKV-12m3v2-eGFP (n=6). Treatment with SKV-12m3v2-eGFP +anti-PD-1 antibody showed increased survival benefit compared to treatment with SKV alone (P<0.05); however, there was no statistically significant difference in survival when comparing SKV-12m3v2-eGFP +anti-PD-1 antibody to SKV-12m3v2-eGFP alone. All statistical tests were performed using the log-rank (Mantel-Cox) test with GraphPad Prism 8.2.

[2230] When the six mice with complete regression of initial tumors in the SKV-12m3v2-eGFP+anti-PD-1 antibody group were rechallenged with 5×10⁵ MC38 cells on the opposite flank, 2 mice displayed tumor growth and 4 mice remained resistant to tumor growth.

### 6.27. Example 27

### Comparison of Efficacy of SKV Expressing Membrane Bound IL-12p35-TM Subunit Versus IL12p7O-TM Subunit on Tumor Volume MC-38 Mouse Models

[2231] The purpose of this study was to compare the efficacy of SKV-mIL12p35 to SKV-mIL12p70 and SKV in the MC38 tumor model to assess whether there are difference in tumor control and survival related to the immune stimulatory potential of the 2 IL12 subunits. MC38 colorectal cancer cells (5×10⁵) were re-suspended in 100 μl of 1:1 mixture of Matrigel and serum free DMEM media were injected SC into the right flank of C57BL/6 mice. Tumors were allowed to grow for 7 days until they were approximately 3×3 mm. Animals were then randomized into 4 treatment groups and then treated with PBS, SKV, SKV-mIL12p35 or SKV-mIL12p70. Virus was diluted in PBS to deliver 1×10⁷ PFU/mouse in 100 μl and then total volume was injected into the center of the tumor creating a single needle track. Results are shown in FIG. 51. SKV, SKV-mIL12p35 and SKV-mIL12p70 treated mice all showed a reduction in tumor volume in comparison to control PBS treated mice. SKV-mIL12p35 and SKV-mIL12p70 treatment were both more effective than SKV treatment alone. SKV-mIL12p35 and SKV-mIL12p70 treated mice showed comparable reductions in tumor volume.

### 6.28. Example 28

### SKV in a heterologous Prime-Boost Oncolytic Vaccine Regimen

[2232] Preliminary results showed that SKV can be used to either prime or boost an immune response in a heterologous vaccine. Ovalbumin (OVA) was used as a foreign antigen in a heterologous prime-boost combination. Animals were primed on day 1, assessed on day 8-10 and then boosted on day 14 and assessed again after the boost at day 21-24. Healthy C57 black mice were treated with PBS (control), Adenovirus expressing OVA, wild-type Copenhagen strain vaccinia virus expressing OVA or CopMD5p3p (SKV backbone) expressing OVA as a prime or a boost. Tetramer analysis was performed evaluating OVA specific responses on Day 21. The mice were assessed at 10 days, showing that CopMD5p3p or SKV backbone but not Copenhagen virus induced immune responses both in prime and boost setting in C57BL/6 mice that were dosed with prime on day 1 and then immune boosted on Day 14 as shown in FIG. 52. CopMD5p3p (SKV backbone) can prime, and the prime response can be boosted by Maraba MG1 oncolytic rhabdovirus. CopMD5p3p (SKV backbone) can boost an Adenovirus prime response. CopMD5p3p (SKV backbone) outperformed parental Copenhagen virus in both priming and boosting an immune response to the foreign antigen.

### 6.29. Example 29

### BioDistribution of SKV-123 Transgenes with IT vs IV Administration

[2233] The effect of different routes of administration (IV vs IT) on the biodistribution of the transgenes (Anti-CTLA-4 antibody, FLT3L and IL-12-TM) expressed as a result of treatment with SKV-123 was studied. Female BALB/c mice were engrafted with CT26-LacZ tumor cells (3×10⁵ cells) and subsequently given SKV-123 two weeks later (dose 1×10⁸ PFU) by either IV injection on Study Days 1, 3 and 5, or IT injection on Study Days 1 and 3. Blood and tissues were harvested on Days 2, 4, 6, 8 and 22 for tumor-bearing groups. Spleens were harvested on Days 28 and 43 for non-tumor-bearing groups. Serum was isolated from blood samples (collected from cardiac punctures) and tissues were homogenized for ELISA of FLT3L and anti-CTLA-4 antibody expression. ELISA was performed only on samples that tested positive for viral genomes by PCR. For IL-12-TM biodistribution, tissues were harvested on Days 2, 4, 8, 22, 28, and 43. Tissues were homogenized for Western Blot analysis of IL-12-TM transgene expression. Western Blotting was performed only on samples that tested positive for viral genomes by PCR. Anti-Tubulin was used as a loading control. Tubulin could not be detected in spleen and tail samples, however the presence of protein was confirmed with Ponceau staining of the blot after transfer. SKV-123 given by IV injection on Days 1 and 3 resulted in detectable levels of anti-CTLA-4 antibody and FLT3L in the serum (FIGS. 53A, 53B) and at lower concentrations in the tumors of mice on day 2 (FIGS. 53C, 53D). FLT3L could also be detected on Day 2 in the spleen and tail, and still at Day 4 after IV treatment (FIGS. 53C, 53D). Anti-CTLA-4 antibody remained detectable in the serum on Day 4 regardless of IV or IT treatment (FIG. 53A). IT treatment of SKV-123 resulted in FLT3L concentrations in the tumor on Day 4 (FIG. 53F), while anti-CTLA-4 antibody concentrations were low but detectable (FIG. 53E). Tumor-selective transgene expression has been demonstrated in murine tumor models in which therapeutic payload concentrations were achieved within the tumor (e.g., >7.5 ng/ml FLT3L) without any detectable transgene product detected in the systemic circulation.

[2234] Western blotting for IL-12-TM showed only non-specific bands in liver (FIG. 54A), while no IL-12-TM was detected in the tumor, spleen, lungs or tail of animals (FIGS. 54A-54D). The biodistribution of SKV-123 in immunocompetent tumor-bearing mice was restricted to the tumor in IT treated animals and to the tumor and a limited number of other tissues at very low levels in the first few days following IV treatment.

[2235] Viral genomes were not detected in the brain, heart, kidney, ovary, inguinal lymph node, bone marrow, or serum at any of the time points assessed. Viral genomes were only detectable in tumor samples at the Day 4 time point, with the exception of one sample at the Day 9 time point. Genomes were detectable in some tail, lung, spleen, and liver samples, primarily at the Day 2 and 4 time points. No genomes were detected in any samples from the Day 23 harvest group.

[2236] Viral titers for SKV-123 virus were highest in the tail at Day 2 post-treatment by IV injection, with detectable low levels in the spleen, lung and liver. At Day 4, titers were only detected in the tail for IV injection groups. Viral titers were detected in the tumor for both administration routes, with higher titers found after IT injection compared to IV injection. Virus was also detected in the lung at comparable levels for both routes of administration.

[2237] None of the environmental shedding samples (serum, urine, saliva) examined in this study contained any detectable viral genomes or replicating virus.

### 6.30. Example 30

### Efficacy of SKV-123v2 on Tumor Volume in a Humanized Mouse Model

[2238] The efficacy of SKV-123v2 on the growth of tumours in a humanized mouse model was studied. NOD scid gamma (NSG) mice are a brand of immunodeficient laboratory mice that can be treated with human PBMCs and as a result develop a human-like immune system. Female NSG mice were implanted with human PBMCs and then 2 weeks later engrafted subcutaneously with 1×10⁷ UM-UC-3 xenograft human bladder tumor cells. Tumor volumes (mm³) were calculated using the equation for an ellipsoid sphere (l×w²)/2=mm³, where l and w refer to the larger and smaller dimensions collected at each measurement. When tumors were a minimum of 100 mm³, the mice were treated with SKV-123v2 at 1×10⁸ PFU or saline control by IV injection every two days for three weeks. Basic mouse wellness was assessed and tumor volume measured over the course of the study. Tumors were measured twice a week starting on Day 4 of implantation and then from the first day of treatment. On Day 21 the SKV-123v2 treated animals had a mean tumor volume of 164 mm³ corresponding to a difference of −8.4% relative to the vehicle-treated control with the maximum effect being observed on Day 32 with a difference of −53.2% relative to the control (FIG. 55).

### 6.31. Example 31

### In Vitro Infectivity Comparison of SKV-123v2 in Tumor and Normal Cells

[2239] Viral replication, cytotoxicity, transgene expression and cytokine production following SKV-123v2 virus infection of human normal (PBMC, PrEC) and cancer (786-O, HeLa) cells were characterized in vitro. Human peripheral blood mononuclear cells (PBMCs) were purchased from Lonza (Cat#: CC-2702). Human prostate epithelial cells (PrEC) were purchased from Lonza (Cat. #: CC-2555). 786-O human renal adenocarcinoma cells were purchased from ATCC (Cat. #:CRL-1932). HeLa human cervical cancer cells were purchased from ATCC (Cat. #: CCL-2).

[2240] Cells were seeded on 24-well plates. Cell viability and cytokine expression were assessed at four time points: 6 hr, 24 hr, 48 hr and 72 hrs post infection. To determine the number of viable cells/mL and percent viability of each cell suspension, cell suspensions were placed in a ViCell cup at 0.6 mL each and samples were logged into the instrument. Dilutions were prepared. Cells were infected when monolayers were >80% confluent (24 hrs following cell seeding). On the day of infection, virus was diluted to the appropriate doses as outlined in Table 47 below. Infection was conducted in 24-well plates.

TABLE 47
Infection Calculations for 24-Well Plates

| | SKV-123v2 | | | |
|---|---|---|---|---|
| | # | | | |
| | cells/ | # wells | Volume | Volume |
| MOI | well | to make | virus | SFM (μL) |
| MOI 0.01 | 2 × 10⁵ | 55 | 1.64 μL | 2750 |
| | | | of 1:10× | |
| MOI 0.1 | 2 × 10⁵ | 55 | 1.64 μL | 2750 |
| | | | stock | |
| MOI 1 | 2 × 10⁵ | 55 | 16.4 μL | 2733.6 |
| | | | stock | |

[2241] Cytokine profiling was conducted at the indicated time points. Infected cell supernatants were aliquoted, stored at −20° C. and sent to Eve Technologies for analysis using the Human Cytokine Array/Chemokine Array 42-Plex with IL-18 (HD42). FLT3L and ipilimumab expression were assessed using ELISA assays. Cell Viability was conducted at each harvest timepoint using Alamar Blue, read out on Fluoroskan to determine % viability of treatment wells relative to untreated control wells. Viral titer was determined to assess replication kinetics between different cell lines.

[2242] Normal cells were cultured in the presence of serum growth factors and in a lack of contact inhibition in order to maximize cell viability at the time of infection. Under the tested conditions and at the equivalent cell density used for SKV-123v2 infection experiments, PrECs (prostate epithelial cells) demonstrated a proliferative rate almost as high as HeLa cancer cells. To better define the phenotype of the tested normal cell lines when cultured under these conditions, a proliferation assay measuring BrdU incorporation was conducted on PrEC cells and PBMCs in a companion study. The intermediate replication of SKV-123v2 in PrECs as compared to the cancer cell lines and PBMCs correlated with the relative proliferation rate of this normal cell line observed under in vitro infection conditions.

[2243] The results show that 786-O and HeLa cancer cell lines were sensitive to SKV-123v2 virus infection as evidenced by a decrease in cell viability in a dose dependent and time dependent manner (FIG. 56). 786-O cell viability decreased over time at all MOIs tested while HeLa cell viability decreased upon SKV-123v2 virus infection at an MOI of 1 and 0.1. Normal human PBMCs were resistant to infection as evidenced by high cell viability following SKV-123v2 virus infection at MOIs of 1, 0.1, and 0.01 (FIG. 56). Normal human PrECs were less sensitive to SKV-123v2 virus infection when compared to cancer cell lines. No decrease in cell viability was observed at any MOI (1, 0.1 and 0.01) up to 48 hours post-infection. By 72 hr post infection, decreased cell viability was noted upon SKV-123v2 virus infection at an MOI of 1 and 0.1 (FIG. 56).

[2244] SKV-123v2 viruses infected and replicated in cancer cell lines at higher rates when compared to normal human PrECs (FIG. 57). They infected and replicated in 786-O and HeLa cancer cell lines to levels greater than 10-fold when compared to normal human PrECs. SKV-123v2 viruses did not replicate in normal human PBMCs at MOIs of 1, 0.1, and 0.01 (FIG. 59).

[2245] Anti-CTLA-4 antibody and FLT3L (two transgene products produced by SKV-123v2 virus-infected cells) production was monitored in cell supernatant at each MOI and timepoint. SKV-123v2 virus infection resulted in greater production of anti-CTLA-4 antibody and FLT3L in cancer cells when compared to normal cells (PrEC cells or PBMCs) (FIGS. 58 and 59). No anti-CTLA-4 antibody or FLT3L could be detected in PBMC cell supernatant. FLT3L and anti-CTLA-4 antibody transgene product concentrations correlated with cell susceptibility to SKV-123v2 infection.

[2246] In the cytokine profiling experiment, higher levels of cytotoxicity were observed in SKV-123v2 virus-infected cancers cells than normal cells.

[2247] The cell line PrEC was particularly responsive to viral infection, producing EGF, G-CSF, IL-la, IL-1RA, IL-4, and IL-18 in a context where only low or negligible concentrations of these cytokines were detectable from HeLa, 786-0, and PBMCs. PrEC and 786-0 were the only cell lines that produced IL-8, TGF-α, and TNFα in response to infection; while only PrEC and PBMC produced IP-10. PrEC showed dose-dependent production of EGF, with increased production at higher MOI of virus infection. EGF concentration remained consistent within the same dosing group between 24 to 72 hours with a slight increase at 72 hours for cells infected with MOI 1 of virus. In PrEC cells, IL-la production remained mostly consistent to baseline for 48 hours post-infection, and then increased at 72 hours, with the highest concentrations observed at MOI 1. Likewise, IL-1RA and IL-18 production by PrEC showed dramatic increases in concentration at 72 hours post-infection with low (slight IL-1RA increase at 24 hours in higher MOI 0.1 and 1 infection) or negligible prior to this time point. While production of IL-1RA seemed dose-dependent at 72 hours, MOI 1 of virus resulted in reduced IL-18 production compared to MOI 0.1. PrEC produced reduced IL-4 at 6 hours post-infection in all dosing groups compared to untreated control. However, this IL-4 production increased at 24 hours above baseline and remained high to 72 hours post-infection.

[2248] Alternatively, all cell lines, except PrEC, produced MCP-1. In HeLa and 786-0 cells, high concentrations of MCP-1 were produced at baseline and unaffected by viral infection. In PBMCs, MCP-1 was induced above baseline by high doses of virus: MOI 1 of virus at 24 hours and MOI 0.1 and 1 of virus at 72 hours post-infection.

[2249] Several cytokines increased at 24 and 72 hours post-infection, but not 48 hours (or only marginally), over baseline. In HeLa cells, these are FGF-2 (at MOI 1, while lower dosing was only able to induce production at 72 hours) and IL-6 (MOI 0.01 and 0.1 only; MOI 1 concentrations were consistent over time). In PrEC cells, these are G-CSF (at MOI 0.01 and 0.1 only; MOI 1 concentrations were consistent over time), TGF-α (at MOI 0.01 and 0.1 only; MOI 1 concentrations were consistent over time), TNFα (at MOI 0.01 and 0.1 only; MOI 1 increased over time), and IP-10 (MOI 0.1 and 0.1 only; MOI 1 produced low concentrations). In 786-0 cells, these are FGF-2 (in MOI 0.1 and 1 only; lowest dose MOI 0.01 only induced production at 72 hours), IL-8 (at MOI 0.01 and 0.1 only; MOI 1 concentrations were consistent over time) and TGF-α (at MOI 0.01 and 0.1 only), TNFα (MOI 0.01 and 0.1 only; MOI concentrations were baseline over time). In PBMCs, the cytokine is IP-10 (at MOI 1 only).

[2250] IFNα2 production in HeLa and 786-0 cells peaked at 24 hours post-infection and then dropped over the time-course, while in PrEC cells, IFNα2 production was highest at 72 hours. In all three cell lines, higher dosing at MOI 0.1 or 1 exhibited the lowest cytokine production among the dosing groups.

[2251] IFNγ production was low in all cell lines, with 786-0 exhibiting peak production at 24 hours and then decreasing over time.

### 6.32. Example 32

### Generation of Recombinant Vaccinia Viruses

[2252] The methods and techniques described in this example were used to generate the vectors described in Table 45. As summarized in Table 45, each of the vectors has been demonstrated to be replication-competent, to express the transgene(s) contained in the vector, and to exhibit cytotoxicity in the cancer cell lines as indicated. Assays as described below were used to generate the data summarized in Table 45.

[2253] Recombination

[2254] Monolayers of nearly confluent (80-90%) U205 cells are first infected for 2 hrs with vaccinia virus (e.g., SKV virus) to be modified. Following infection, targeting DNA (FIG. 60) is transfected into infected cells. The following day (12-18 hrs post transfection), transfection media is removed and fresh media is added to cells. On the second day (˜48 hrs post transfection) cells are frozen and thawed for plaque purification.

[2255] Plaque Purification and Amplification

[2256] To identify recombinant vaccinia viruses, plaques are screened using the fluorescent marker. Serial dilutions (1:10) of the infection/transfection mixture from the previous step are added to confluent monolayers of U205 cells for 2 hr after which the media is replaced with overlay media to allow plaque formation. Two days later, fluorescent plaques are picked, serially diluted and added to fresh monolayers of U205 cells followed by overlay media. This process of plaque purification is repeated until all plaques are fluorescent. In order to remove the fluorescent marker, the appropriate recombinase is transfected with the fluorescent virus as outlined in the above step (i.e., Recombination). The process of plaque purification is then continued to select for non-fluorescent plaques.

[2257] A plaque of a pure recombinant virus is then used to infect monolayers of another cell line (e.g., HeLa cells) for expansion, at this step no overlay is added. Once visible cytopathic effect is seen on infected cells, cell lysate is collected and the recombinant virus concentration is determined by viral tittering.

[2258] Transgene Expression

[2259] Recombinant viruses are used to infect a variety of cancer cells (e.g., HeLa, U205, 786-O, etc.) at various concentrations (e.g., MOI 0.01, 0.1 or 1) for various amounts of time (e.g., 6 hrs, 24 hrs, 48 hrs and 72 hrs post infection). Cell lysates (for Western blot) and cell supernatants (for ELISA) are frozen and stored at −80 ° C. for assays relating to transgene production. For transgenes encoding a soluble protein (e.g., FLT3L, anti-CTLA-4 antibody) ELISA kits are used to quantify transgene production. For transgenes encoding cell restricted (e.g., inside the cell or membrane bound) protein products (e.g., membrane bound IL-12), western blots of cell lysates are used to quantify transgene production.

[2260] Cancer Cell Line Cytotoxicity

[2261] Cancer cell line cytotoxicity is determined by the visible cytopathic effect seen by light microscopy on infected cells. The cell lysate may be collected and the recombinant virus concentration determined by viral titering.

### Some Embodiments

[2262] All publications, patents, and patent applications mentioned in this specification are incorporated herein by reference to the same extent as if each independent publication or patent application was specifically and individually indicated to be incorporated by reference.

[2263] While the invention has been described in connection with specific embodiments thereof, it will be understood that it is capable of further modifications and this application is intended to cover any variations, uses, or adaptations of the invention following, in general, the principles of the invention and including such departures from the invention that come within known or customary practice within the art to which the invention pertains and may be applied to the essential features hereinbefore set forth, and follows in the scope of the claims.

[2264] Some embodiments are within the claims.

LENGTHY TABLES
The patent application contains a lengthy table section. A copy of the table is available in electronic form from the USPTO web site (https://seqdata.uspto.gov/?pageRequest=docDetail&DocID=US20220056480A1). An electronic copy of the table will also be available from the USPTO upon request and payment of the fee set forth in 37 CFR 1.19(b)(3).

The application's sequence listing, which the Patent Office published only in electronic form, follows.

SEQUENCE LISTING (632 sequences)

SEQ ID NO: 1 - protein, 272 aa, Vaccinia virus
MRYIIILAVLFINSIHAKITSYKFESVNFDSKIEWTGDGLYNISLKNYGIKTWQTMYTNVPEGTYDISAFPKNDFVSFWVKFEQGDYKVEEYCTGLCVEVKIGPPTVTLTEYDDHINLYIEHPYATRGSKKIPIYKRGDMCDIYLLYTANFTFGDSEEPVTYDIDDYDCTSTGCSIDFATTEKVCVTAQGATEGFLEKITPWSSEVCLTPKKNVYTCAIRSKEDVPNFKDKMARVIKRKFNKQSQSYLTKFLGSTSNDVTTFLSMLNLTKYS

SEQ ID NO: 2 - protein, 222 aa, Vaccinia virus
MNHCLLAISAVYFKAKWLTPFEKEFTSDYPFYVSPTEMVDVSMMSMYGELFNHASVKESFGNFSIIELPYVGDTSMMVILPDKIDGLESIEQNLTDTNFKKWCNSLDAMFIDVHIPKFKVTGSYNLVDTLVKSGLTEVFGSTGDYSNMCNLDVSVDAMIHKTYIDVNEEYTEAAAATCALVSDCASTITNEFCVDHPFIYVIRHVDGKILFVGRYCSPTTNC

SEQ ID NO: 3 - protein, 149 aa, Vaccinia virus
MTANFSTHVFSPQHCGCDRLTSIDDVKQCLTEYIYWSSYAYRNRQCAGQLYSTLLSFRDDAELVFIDIRELVKNMPWDDVKDCTEIIRCYIPDEQKTIREISAIIGLCAYAATYWGGEDHPTSNSLNALFVMLEMLNYVDYNIIFRRMN

SEQ ID NO: 4 - protein, 30 aa, Vaccinia virus
MSILPVIFLPIFFYSSFVQTFNASECIDKG

SEQ ID NO: 5 - protein, 340 aa, Vaccinia virus
MSRKFMQVYEYDREQYLDEFIEDRYNDSFITSPEYYSAEKYMCRYTTLNHNCVNVRRCALDSKLLHDIITNCKIYNNIELVRATKFVYYLDLIKCNWVSKVGDSVLYPVIFITHTSTRNLDKVSVKTYKGVKVKKLNRCADHAIVINPFVKFKLTLPNKTSHAKVLVTFCKLRTDITPVEAPLPGNVLVYTFPDINKRIPGYIHVNIEGCIDGMIYINSSKFACVLKLHRSMYRIPPFPIDICSCCSQYTNDDIEIPIHDLIKDVAIFKNKETVYYLKLNNKTIARFTYFNNIDTAITQEHEYVKIALGIVCKLMINNMHSIVGVNHSNTFVNCLLEDNV

SEQ ID NO: 6 - protein, 574 aa, Vaccinia virus
MSRRLIYVLNINRKSTHKIQENEIYTYFSHCNIDHTSTELDFVVKNYDLNRRQHVTGYTALHCYLYNNYFTNDVLKILLNHDVNVTMKTSSGRMPVYILLTRCCNISHDVVIDMIDKDKNHLSHRDYSNLLLEYIKSRYMLLKEEDIDENIVSTLLDKGIDPNFKQDGYTALHYYYLCLAHVYKPGECRKPITIKKAKRIISLFIQHGANLNALDNCGNTPFHLYLSIEMCNNIHMTKMLLTFNPNFKICNNHGLTPILCYITSDYIQHDILVMLIHHYETNVGEMPIDERRMIVFEFIKTYSTRPADSITYLMNRFKNINIYTRYEGKTLLHVACEYNNTQVIDYLIRINGDINALTDNNKHATQLIIDNKENSPYTINCLLYILRYIVDKNVIRSLVDQLPSLPIFDIKSFEKFISYCILLDDTFYDRHVKNRDSKTYRYAFSKYMSFDKYDGIITKCHDETMLLKLSTVLDTTLYAVLRCHNSRKLRRYLTELKKYNNDKSFKIYSNIMNERYLNVYYKDMYVSKVYDKLFPVFTDKNCLLTLLPSEIIYEILYMLTINDLYNISYPPTKV

SEQ ID NO: 7 - protein, 353 aa, Vaccinia virus
MTMKMMVHIYFVSLSLLLLLFHSYAIDIENEITEFFNKMRDTLPAKDSKWLNPACMFGGTMNDMATLGEPFSAKCPPIEDSLLSHRYKDYVVKWERLEKNRRRQVSNKRVKHGDLWIANYTSKFSNRRYLCTVTTKNGDCVQGIVRSHIKKPPSCIPKTYELGTHDKYGIDLYCGILYAKHYNNITWYKDNKEINIDDIKYSQTGKELIIHNPELEDSGRYDCYVHYDDVRIKNDIVVSRCKILTVIPSQDHRFKLILDPKINVTIGEPANITCTAVSTSLLIDDVLIEWENPSGWLIGFDFDVYSVLTSRGGITEATLYFENVTEEYIGNTYKCRGHNYYFEKTLTTTVVLE

SEQ ID NO: 8 - protein, 127 aa, Vaccinia virus
MDEDTRLSRYLYLTDREHINVDSIKQLCKISDPNACYRCGCTALHEYFYNYRSVNGKYKYRYNGYYQYYSSSDYENYNEYYYDDYDRTGMNSESDSESDNISIKTEYENEYEFYDETQDQSTQHNDL

SEQ ID NO: 9 - protein, 224 aa, Vaccinia virus
MVKNNKISNSCRMIMSTNPNNILMRHLKNLTDDEFKCIIHRSSDFLYLSDSDYTSITKETLVSEIVEEYPDDCNKILAIIFLVLDKDIDVDIETKLKPKPAVRFAILDKMTEDIKLTDLVRHYFRYIEQDIPLGPLFKKIDSYRTRAINKYSKELGLATEYFNKYGHLMFYTLPIPYNRFFCRNSIGFLAVLSPTIGHVKAFYKFIEYVSIDDRRKFKKELMSK

SEQ ID NO: 10 - protein, 512 aa, Vaccinia virus
MESVIFSINGEIIQVNKEIITASPYNFFKRIQDHHLKDEAIILNGINYHAFESLLDYMRWKKINITINNVEMILVAAVIIDVPPVVDLCVKTMIHNINSTNCIRMFNFSKRYGIKKLYNASMSEIINNITAVTSDPEFGKLSKDELTTILSHEDVNVNHEDVTAMILLKWIHKNPNDVDIINILHPKFMTNTMRNAISLLGLTISKSTKPVTRNGIKHNIVVIKNSDYISTITHYSPRTEYWTIVGNTDRQFYNANVLHNCLYIIGGMINNRHVYSVSRVDLETKKWKTVTNMSSLKSEVSTCVNDGKLYVIGGLEFSISTGVAEYLKHGTSKWIRLPNLITPRYSGASVFVNDDIYVMGGVYTTYEKYVVLNDVECFTKNRWIKKSPMPRHHSIVYAVEYDGDIYVITGITHETRNYLYKYIVKEDKWIELYMYFNHVGKMFVCSCGDYILIIADAKYEYYPKSNTWNLFDMSTRNIEYYDMFTKDETPKCNVTHKSLPSFLSNCEKQFLQ

SEQ ID NO: 11 - protein, 226 aa, Vaccinia virus
MLSMFMCNNIVDYVDDIDNGIVQDIEDEASNNVDHDYVYPLPENMVYRFDKSTNILDYLSTERDHVMMAVRYYMSKQRLDDLYRQLPTKTRSYIDIINIYCDKVSNDYNRDMNIMYDMASTKSFTVYDINNEVNTILMDNKGLGVRLATISFITELGRRCMNPVKTIKMFTLLSHTICDDCFVDYITDISPPDNTIPNTSTREYLKLIGITAIMFATYKTLKYMIG

SEQ ID NO: 12 - protein, 147 aa, Vaccinia virus
MFNMNINSPVRFVKETNRAKSPTRQSPGAAGYDLYSAYDYTIPPGERQLIKTDISMSMPKICYGRIAPRSGLSLKGIDIGGGVIDEDYRGNIGVILINNGKCTFNVNTGDRIAQLIYQRIYYPELEEVQSLDSTNRGDQGFGSTGLR

SEQ ID NO: 13 - protein, 480 aa, Vaccinia virus
MPIFVNTVYCKNILALSMTKKFKTIIDAIGGNIIVNSTILKKLSPYFRTHLRQKYTKNKDPVTRVCLDLDIHSLTSIVIYSYTGKVYIDSHNVVNLLRASILTSVEFIIYTCINFILRDFRKEYCVECYMMGIEYGLSNLLCHTKNFIAKHFLELEDDIIDNFDYLSMKLILESDELNVPDEDYVVDFVIKWYIKRRNKLGNLLLLIKNVIRSNYLSPRGINNVKWILDCTKIFHCDKQPRKSYKYPFIEYPMNMDQIIDIFHMCTSTHVGEVVYLIGGWMNNEIHNNAIAVNYISNNWIPIPPMNSPRLYATGIPANNKLYVVGGLPNPTSVERWFHGDAAWVNMPSLLKPRCNPAVASINNVIYVMGGHSETDTTTEYLLPNHDQWQFGPSTYYPHYKSCALVFGRRLFLVGRNAEFYCESSNTWTLIDDPIYPRDNPELIIVDNKLLLIGGFYRGSYIDTIEVYNHHTYSWNIWDGK

SEQ ID NO: 14 - protein, 284 aa, Vaccinia virus
MDLSRINTWKSKQLKSFLSSKDTFKADVHGHSALYYAIADNNVRLVCTLLNAGALKNLLENEFPLHQAATLEDTKIVKILLFSGMDDSQFDDKGNTALYYAVDSGNMQTVKLFVKKNWRLMFYGKTGWKTSFYHAVMLNDVSIVSYFLSEIPSTFDLAILLSCIHTTIKNGHVDMMILLLDYMTSTNTNNSLLFIPDIKLAIDNKDIEMLQALFKYDINIYSVNLENVLLDDAEITKMIIEKHVEYKSDSYTKDLDIVKNNKLDEIISKNKELRLMYVNCVKKN

SEQ ID NO: 15 - protein, 369 aa, Vaccinia virus
MIALLILSLTCSVSTYRLQGFTNAGIVAYKNIQDDNIVFSPFGYSFSMFMSLLPASGNTRIELLKTMDLRKRDLGPAFTELISGLAKLKTSKYTYTDLTYQSFVDNTVCIKPLYYQQYHRFGLYRLNFRRDAVNKINSIVERRSGMSNVVDSNMLDNNTLWAIINTIYFKGTWQYPFDITKTRNASFTNKYGTKTVPMMNVVTKLQGNTITIDDEEYDMVRLPYKDANISMYLAIGDNMTHFTDSITAAKLDYWSFQLGNKVYNLKLPKFSIENKRDIKSIAEMMAPSMFNPDNASFKHMTRDPLYIYKMFQNAKIDVDEQGTVAEASTIMVATARSSPEKLEFNTPFVFIIRHDITGFILFMGKVESP

SEQ ID NO: 16 - protein, 88 aa, Vaccinia virus
MLAFCYSLPNAGDVIKGRVYEKDYALYIYLFDYPHSEAILAESVKMHMDRYVEYRDKLVGKTVKVKVIRVDYTKGYIDVNYKRMCRHQ

SEQ ID NO: 17 - protein, 424 aa, Vaccinia virus
MNPDNTIAVITETIPIGMQFDKVYLSTFNMWREILSNTTKTLDISSFYWSLSDEVGTNFGTIILNEIVQLPKRGVRVRVAVNKSNKPLKDVERLQMAGVEVRYIDITNILGGVLHTKFWISDNTHIYLGSANMDWRSLTQVKELGIAIFNNRNLAADLTQIFEVYWYLGVNNLPYNWKNFYPSYYNTDHPLSINVSGVPHSVFIASAPQQLCTMERTNDLTALLSCIRNASKFVYVSVMNFIPIIYSKAGKILFWPYIEDELRRSAIDRQVSVKLLISCWQRSSFIMRNFLRSIAMLKSKNIDIEVKLFIVPDADPPIPYSRVNHAKYMVTDKTAYIGTSNWTGNYFTDTCGASINITPDDGLGLRQQLEDIFMRDWNSKYSYELYDTSPTKRCKLLKNMKQCTNDIYCDEIQPEKEIPEYSLE

SEQ ID NO: 18 - protein, 136 aa, Vaccinia virus
MGATISILASYDNPNLFTAMILMSPLVNADAVSRLNLLAAKLMGTITPNAPVGKLCPESVSRDMDKVYKYQYDPLINHEKIKAGFASQVLKATNKVRKIISKINTPRLSYSREQTMRLVMFQVHIISCNMQIVIEK

SEQ ID NO: 19 - protein, 81 aa, Vaccinia virus
MSANCMFNLDNDYIYWKPITYPKALVFISHGAGKHSGRYDELAENISSLGILVFSHDHIGHGRSNGEKMMIDDFGTARGNY

SEQ ID NO: 20 - protein, 149 aa, Vaccinia virus
MATKLDYEDAVFYFVDDDKICSRDSIIDLIDEYITWRNHVIVFNKDITSCGRLYKELMKFDDVAIRYYGIDKINEIVEAMSEGDHYINFTKVHDQESLFATIGICAKITEHWGYKKISESRFQSLGNITDLMTDDNINILILFLEKKLN

SEQ ID NO: 21 - protein, 472 aa, Vaccinia virus
MIFVIESKLLQIYRNRNRNINFYTTMDNIMSAEYYLSLYAKYNSKNLDVFRNMLQAIEPSGNNYHILHAYCGIKGLDERFVEELLHRGYSPNETDDDGNYPLHIASKINNNRIVAMLLTHGADPNACDKHNKTPLYYLSGTDDEVIERINLLVQYGAKINNSVDEEGCGPLLACTDPSERVFKKIMSIGFEARIVDKFGKNHIHRHLMSDNPKASTISWMMKLGISPSKPDHDGNTPLHIVCSKTVKNVDIIDLLLPSTDVNKQNKFGDSPLTLLIKTLSPAHLINKLLSTSNVITDQTVNICIFYDRDDVLEIINDKGKQYDSTDFKMAVEVGSIRCVKYLLDNDIICEDAMYYAVLSEYETMVDYLLFNHFSVDSVVNGHTCMSECVRLNNPVILSKLMLHNPTSETMYLTMKAIEKDKLDKSIIIPFIAYFVLMHPDFCKNRRYFTSYKRFVTDYVHEGVSYEVFDDYF

SEQ ID NO: 22 - protein, 220 aa, Vaccinia virus
MVYKLVLLFCIASLGYSVEYKNTICPPRQDYRYWYFAAELTIGVNYDINSTIIGECHMSESYIDRNANIVLTGYGLEINMTIMDTDQRFVAAAEGVGKDNKLSVLLFTTQRLDKVHHNISVTITCMEMNCGTTKYDSDLPESIHKSSSCDITINGSCVTCVNLETDPTKINPHYLHPKDKYLYHNSEYGMRGSYGVTFIDELNQCLLDIKELSYDICYRE

SEQ ID NO: 23 - protein, 117 aa, Vaccinia virus
MRTLLIRYILWRNDNDQTYYNDDFKKLMLLDELVDDGDVCTLIKNMRMTLSDGPLLDRLNQPVNNIEDAKRMIAISAKVARDIGERSEIRWEESFTILFRMIETYFDDLMIDLYGEK

SEQ ID NO: 24 - protein, 224 aa, Vaccinia virus; identical to SEQ ID NO: 9

SEQ ID NO: 25 - protein, 117 aa, Vaccinia virus; identical to SEQ ID NO: 23

SEQ ID NO: 26 - protein, 175 aa, Vaccinia virus
MTSSAMDNNEPKVLEMVYDATILPEGSSMDPNIMDCINRHINMCIQRTYSSSIIAILNRFLTMNKDELNNTQCHIIKEFMTYEQMAIDHYGEYVNAILYQIRKRPNQHHTIDLFKKIKRTPYDTFKVDPVEFVKKVIGFVSILNKYKPVYSYVLYENVLYDEFKCFINYVETKYF

SEQ ID NO: 27 - protein, 472 aa, Vaccinia virus; identical to SEQ ID NO: 21

SEQ ID NO: 28 - protein, 220 aa, Vaccinia virus; identical to SEQ ID NO: 22

SEQ ID NO: 29 - protein, 284 aa, Vaccinia virus; identical to SEQ ID NO: 14

SEQ ID NO: 30 - protein, 369 aa, Vaccinia virus; identical to SEQ ID NO: 15

SEQ ID NO: 31 - protein, 81 aa, Vaccinia virus
MGHIITYCQVHTNISILIRKAHHIIFFVIDCDCISLQFSNYVHHGNRFRTVLISKTSIACFSDIKRILPCTFKIYSINDCP

SEQ ID NO: 32 - protein, 79 aa, Vaccinia virus
MGTVFVPYLLVKLALRVLVISNGYCHVPLKYIVLMIAHRVLLSSILESTTLDIPDLRSTIELILLTASRLKFNLYRPNL

SEQ ID NO: 33 - protein, 88 aa, Vaccinia virus; identical to SEQ ID NO: 16

SEQ ID NO: 34 - protein, 424 aa, Vaccinia virus; identical to SEQ ID NO: 17

SEQ ID NO: 35 - protein, 135 aa, Vaccinia virus
MGATISILASYDNPNLFTAMILMSPLVNADAVSRLNLLAAKLMGTITPNAPVGKLCPESVSRDMDKVYKYQYDPLINHEKIKAGFASQVLKATNKVRKIISKINTPRLSYSREQTMRLVMFQVHIISCNMQIVIE

SEQ ID NO: 36 - protein, 81 aa, Vaccinia virus; identical to SEQ ID NO: 19

SEQ ID NO: 37 - protein, 149 aa, Vaccinia virus; identical to SEQ ID NO: 20

SEQ ID NO: 38 - protein, 226 aa, Vaccinia virus; identical to SEQ ID NO: 11

SEQ ID NO: 39 - protein, 147 aa, Vaccinia virus; identical to SEQ ID NO: 12

SEQ ID NO: 40 - protein, 480 aa, Vaccinia virus; identical to SEQ ID NO: 13

SEQ ID NO: 41 - protein, 512 aa, Vaccinia virus
MESVIFSINGEIIQVNKEIITASPYNFFKRIQDHHLKDEAIILNGINYHAFESLLDYIRWKKINITINNVEMILVAAIIIDVPPVVDLCVKTMIHNINSTNCIRMFNFSKRYGIKKLYNASMSEIINNITAVTSDPEFGKLSKDELTTILSHENVNVNHEDVTAMILLKWIHKNPNDVDIINILHPKFMTNTMRNAISLLGLTISKSTKPVTRNGIKHNIVVIKNSDYISTITHYSPRTEYWTIVGNTDRQFYNANVLHNCLYIIGGMINNRHVYSVSRVDLETKKWKTVTNMSSLKSEVSTCVNDGKLYVIGGLEFSISTGVAEYLKHGTSKWIRLPNLITPRYSGASVFVNDDIYVMGGVYTTYEKYVVLNDVECFTKNRWIKKSPMPRHHSIVYAVEYDGDIYVITGITHETRNYLYKYIVKEDKWIELYMYFNHVGKMFVCSCGDYILIIADAKYEYYPKSNTWNLFDMSTRNIEYYDMFTKDETPKCNVTHKSLPSFLSNCEKQFLQ

SEQ ID NO: 42 - protein, 229 aa, Vaccinia virus
MVKNNKIQKNKISNSCRMIMSTDPNNILMRHLKNLTDDEFKCIIHRSSDFLYLSDSDYTSITKETLVSEIVEEYPDDCNKILAIIFLVLDKDIDVDIKTKLKPKPAVRFAILDKMTEDIKLTDLVRHYFRYIEQDIPLGPLFKKIDSYRTRAINKYSKELGLATEYFNKYGHLMFYTLPIPYNRFFCRNSIGFLAVLSPTIGHVKAFYKFIEYVSIDDRRKFKKELMSK

SEQ ID NO: 43 - protein, 117 aa, Vaccinia virus
MRTLLIRYILWRNDNDQTYYNDNFKKLMLLDELVDDGDVCTLIKNMRMTLSDGPLLDRLNQPVNNIEDAKRMIAISAKVARDIGERSEIRWEESFTILFRMIETYFDDLMIDLYGEK

SEQ ID NO: 44 - protein, 175 aa, Vaccinia virus
MTSSAMDNNEPKVLEMVYDATILPEGSSMDPNIMDCINRHINMCIQRTYSSSIIAILDRFLMMNKDELNNTQCHIIKEFMTYEQMAIDHYGGYVNAILYQIRKRPNQHHTIDLFKRIKRTRYDTFKVDPVEFVKKVIGFVSILNKYKPVYSYVLYENVLYDEFKCFINYVETKYF

SEQ ID NO: 45 - protein, 472 aa, Vaccinia virus
MIFVIESKLLQIYRNRNRNINFYTTMDNIMSAEYYLSLYAKYNSKNLDVFRNMLQAIEPSGNNYHILHAYCGIKGLDERFVEELLHRGYSPNETDDDGNYPLHIASKINNNRIVAMLLTHGADPNACDKHNKTPLYYLSGTDDEVIERINLLVQYGAKINNSVDEEGCGPLLACTDPSERVFKKIMSIGFEARIVDKFGKNHIHRHLMSDNPKASTISWMMKLGISPSKPDHDGNTPLHIVCSKTVKNVDIIDLLLPSTDVNKQNKFGDSPLTLLIKTLSPAHLINKLLSTSNVITDQTVNICIFYDRDDVLEIINDKGKQYDSTDFKMAVEVGSIRCVKYLLDNDIICEDAMYYAVLSEYETMVDYLLFNHFSVDFVVNGHTCMSECVRLNNPVILSKLMLHNPTSETMYLTMKAIEKDRLDKSIIIPFIAYFVLMHPDFCKNRRYFTSYKRFVTDYVHEGVSYEVFDDYF

SEQ ID NO: 46 - protein, 220 aa, Vaccinia virus
MVYKLVLLFCIASLGYSVEYKNTICPPRQDYRYWYFAAELTIGVNYDINSTIIGECHMSESYIDRNANIVLTGYGLEINMTIMDTDQRFVAAAEGVGKDNKLSVLLFTTQRLDKVHHNISVTITCMEMNCGTTKYDSDLPESIHKSSSCDITINGSCVTCVNLETDPTKINPHYLHPKDKYLYHNSEYSMRGSYGVTFIDELNQCLLDIKELSYDICYRE

SEQ ID NO: 47 - protein, 284 aa, Vaccinia virus
MDLSRINTWKSKQLKSFLSSKDAFKADVHGHSALYYAIADNNVRLVCTLLNAGALKNLLENEFPLHQAATLEDTKIVKILLFSGLDDSQFDDKGNTALYYAVDSGNMQTVKLFVKKNWRLMFYGKTGWKTSFYHAVMLNDVSIVSYFLSEIPSTFDLAILLSCIHITIKNGHVDMMILLLDYMTSTNTNNSLLFIPDIKLAIDNKDIEMLQALFKYDINIYSANLENVLLDDAEIAKMIIEKHVEYKSDSYTKDLDIVKNNKLDEIISKNKELRLMYVNCVKKN

SEQ ID NO: 48 - protein, 369 aa, Vaccinia virus
MIALLILSLTCSVSTYRLQGFTNAGIVAYKNIQDDNIVFSPFGYSFSMFMSLLPASGNTRIELLKTMDLRKRDLGPAFTELISGLAKLKTSKYTYTDLTYQSFVDNTVCIKPSYYQQYHRFGLYRLNFRRDAVNKINSIVERRSGMSNVVDSNMLDNNTLWAIINTIYFKGIWQYPFDITKTRNASFTNKYGTKTVPMMNVVTKLQGNTITIDDEEYDMVRLPYKDANISMYLAIGDNMTHFTDSITAAKLDYWSFQLGNKVYNLKLPKFSIENKRDIKSIAEMMAPSMFNPDNASFKHMTRDPLYIYKMFQNAKIDVDEQGTVAEASTIMVATARSSPEKLEFNTPFVFIIRHDITGFILFMGKVESP

SEQ ID NO: 49 - protein, 88 aa, Vaccinia virus
MLAFCYSLPNAGDVIKGRVYEKDYALYIYLFDYPHFEAILAESVKMHMDRYVEYRDKLVGKTVKVKVIRVDYTKGYIDVNYKRMCRHQ

SEQ ID NO: 50 - protein, 424 aa, Vaccinia virus
MNPDNTIAVITETIPIGMQFDKVYLSTFNMWREILSNTTKTLDISSFYWSLSDEVGTNFGTIILNKIVQLPKRGVRVRVAVNKSNKPLKDVERLQMAGVEVRYIDITNILGGVLHTKFWISDNTHIYLGSANMDWRSLTQVKELGIAIFNNRNLAADLTQIFEVYWYLGVNNLPYNWKNFYPSYYNTDHPLSINVSGVPHSVFIASAPQQLCTMERTNDLTALLSCIRNASKFVYVSVMNFIPIIYSKAGNILFWPYIEDELRRAAIDRQVSVKLLISCWQRSSFIMRNFLRSIAMLKSKNINIEVKLFIVPDADPPIPYSRVNHAKYMVTDKTAYIGTSNWTGNYFTDTCGASINITPDDGLGLRQQLEDIFMRDWNSKYSYELYDTSPTKRCRLLKNMKQCTNDIYCDEIQPEKEIPEYSLE

SEQ ID NO: 51 - protein, 44 aa, Vaccinia virus
MQHANCNREIKIYEGAKHHLHKETDEVKKSVMKEIETWIFNRVK

SEQ ID NO: 52 - protein, 134 aa, Vaccinia virus
MTLVQHVVTIKSTYWVIPWELASYDNPNLFTAMILMSPLVNADAVSKLNLLAAKLMGTITLNAPVGKLCPESVSRDMDKVYKYQYDPLINHEKIKAGFASQVLKATNKVRKIISKINTPRLSYSREQTIRLAMF

SEQ ID NO: 53 - protein, 81 aa, Vaccinia virus; identical to SEQ ID NO: 19

SEQ ID NO: 54 - protein, 149 aa, Vaccinia virus; identical to SEQ ID NO: 20

SEQ ID NO: 55 - protein, 226 aa, Vaccinia virus
MLSMFMCNNIVDYVDDIDNGIVQDIEDEASNNVDHDYVYPLPENMVYRFDKSTNILDYLSTERDHVMMAVRYYMSKQRLDDLYRQLPTKTRSYIDIINIYCDKVSNDYNRDMNIMYDMASTKSFTVYDINNEVNTILMDNKGLGVRLATISFITELGRRCMNPVETIKMFTLLSHTICDDYFVDYITDISPPDNTIPNTSTREYLKLIGITAIMFATYKTLKYMIG

SEQ ID NO: 56 - protein, 147 aa, Vaccinia virus
MFNMNINSPVRFVKETNRAKSPTRQSPYAAGYDLYSAYDYTIPPGERQLIKTDISMSMPKFCYGRIAPRSGLSLKGIDIGGGVIDEDYRGNIGVILINNGKCTFNVNTGDRIAQLIYQRIYYPELEEVQSLDSTNRGDQGFGSTGLR

SEQ ID NO: 57 - protein, 480 aa, Vaccinia virus
MPIFVNTVYCKNILALSMTKKFKTIIDAIGGNIIVNSTILKKLSPYFRTHLRQKYTKNKDPVTWVCLDLDIHSLTSIVIYSYTGKVYIDSHNVVNLLRASILTSVEFIIYTCINFILRDFRKEYCVECYMMGIEYGLSNLLCHTKNFIAKHFLELEDDIIDNFDYLSMKLILESDELNVPDEDYVVDFVIKWYIKRRNKLGNLLLLIKNVIRSNYLSPRGINNVKWILDCTKIFHCDKQPRKSYKYPFIEYPMNMDQIIDIFHMCTSTHVGEVVYLIGGWMNNEIHNNAIAVNYISNNWIPIPPMNSPRLYASGIPANNKLYVVGGLPNPTSVERWFHGDAAWVNMPSLLKPRCNPAVASINNVIYVMGGHSETDTTTEYLLPNHDQWQFGPSTYYPHYKSCALVFGRRLFLVGRNAEFYCESSNTWTLIDDPIYPRDNPELIIVDNKLLLIGGFYRESYIDTIEVYNHHTYSWNIWDGK

SEQ ID NO: 58 - protein, 512 aa, Vaccinia virus
MESVIFSINGEIIQVNKEIITASPYNFFKRIQDHHLKDEAIILNGINYHAFESLLDYIRWKKINITINNVEMILVAAIIIDVPPVVDLCVKTMIHNINSTNCIRMFNFSKQYGIKKLYNASMSEIINNITAVTSDPEFGKLSKDELTTILSHEDVNVNHEDVTAMILLKWIHKNPNDVDIINILHPKFMTNTMRNAISLLGLTISKSTKPVTRNGIKHNIVVIKNSDYISTITHYSPRTEYWTIVGNTDRQFYNANVLHNCLYIIGGMINNRHVYSVSRVDLETKKWKTVTNMSSLKSEVSTCVNNGKLYVIGGLEFSISTGVAEYLKHGTSKWIRLPNLITPRYSGASVFVNDDIYVMGGVYTTYEKYVVLNDVECFTKNRWIKKSPMPRHHSIVYAVEYDGDIYVITGITHETRNYLYKYIVKEDKWIELYMYFNHVGKMFVCSCGDYILIIADAKYEYYPKSNTWNLFDMSTRNIEYYDMFTKDETPKCNVTHKSLPSFLSNCEKQFLQ

SEQ ID NO: 59 - protein, 224 aa, Vaccinia virus
MVKNNKISNSCRMIMSTDPNNILMRHLKNLTDDEFKCIIHRSSDFLYLSDSDYTSITKETLVSEIVEEYPDDCNKILAIIFLVLDKDIDVDIKTKLKPKPAVRFAILDKMTEDIKLTDLVRHYFRYIEQDIPLGPLFKKIDSYRTRAINKYSKELGLATEYFNKYGHLMFYTLPIPYNRFFCRNSIGFLAVLSPTIGHVKAFYKFIEYVSIDDRRKFKKELMSK

SEQ ID NO: 60 - protein, 117 aa, Vaccinia virus; identical to SEQ ID NO: 23

SEQ ID NO: 61 - protein, 79 aa, Vaccinia virus
MTSSAMDNNEPKVLEMVYDATILPEGSSMDPYIMDCINRHINMCIQRTYSSSIIAILDRFLMMNKDELNNTQCHIIKNL

SEQ ID NO: 62 - protein, 472 aa, Vaccinia virus
MIFVIESKLLQIYRNRNRNINFYTTMDNIMSAEYYLSLYAKYNSKNLDVFRNMLQAIEPSGNNYHILHAYCGIKGLDERFVEELLHRGYSPNETDDDGNYPLHIASKINNNRIVAMLLTHGADPNACDKHNKTPLYYLSGTDDEVIERINLLVQYGAKINNSVDEEGCGPLLACTDPSERVFKKIMSIGFEARIVDKFGKNHIHRHLMSDNPKASTISWMMKLGISPSKPDHDGNTPLHIVCSKTVKNVDIIDLLLPSTDVNKQNKFGDSPLTLLIKTLSPAHLINKLLSTSNVITDQTVNICIFYDRDDVLEIINDKGKQYDSTDFKMAVEVGSIRCVKYLLDNDIICEDAMYYAVLSEYETMVDYLLFNHFSVDFVVNGHTCMSECVRLNNPVILSKLMLHNLTSETMYLTMKAIEKDRLDKSIIIPFIAYFVLMHPDFCKNRRYFTSYKRFVTDYVHEGVSYEVFDDYF

SEQ ID NO: 63 - protein, 196 aa, Vaccinia virus
MSSSTRLPVLVLAAELTIGVNYDINSTIIGECHMSESYIDRNANIVLTGYGLEINMTIMDTDQRFVAAAEGVGKDNKLSVLLFTTQRLDKVHHNISVTITCMEMNCGTTKYDSDLPESIHKSSSCDITINGSCVTCVNLETDPTKINPHYLHPKDKYLYHNSEYGMRGSYGVTFIDELNQCLLDIKELSYDICYRE

SEQ ID NO: 64 - protein, 76 aa, Vaccinia virus
MLQALFKYDINIYSANLENVLLDDAEIAKMIIEKHVEYKSDSYTKDLDIVKNNKLDEIISKNKELRLMYVNCVKKN

SEQ ID NO: 65 - protein, 189 aa, Vaccinia virus
MDLSRINTWKSKQLKSFLSSKDTFKADVHGHSALYYAIADNNVRLVCTLLNSGALKNLLENEFPLHQAATLEDTKIVKILLFSGLDDSQFDDKGNTALYYAVDSGNMQTVKLFVKKNWRLMFYGKTGWKTSFYHAVMLNDVSIVSYFLSEIPSTFDLAILLSCIHITIKNGHVDMMILLLDYMTVDKHQ

SEQ ID NO: 66 - protein, 368 aa, Vaccinia virus
MIALLILSLACSASAYRLQGFTNAGIVAYKNIQDDNIVFSPFGYSFSMFMSLLPASGNTRIELLKTMDLRKRDLGPAFTELISGLAKLKTSKYTYTDLTYQSFVDNTVCIKPSYYQQYHRFGLYRLNFRRDAVNKINSIVERRSGMSNVVDSNMLDNNTLWAIINTIYFKGTWQYPFDITKTRNASFTNKYGTKTVPMMNVVTKLQGNTITIDDEEYDMVRLPYKDANISMYLAIGDNMTHFTDSITAAKDYWSFQLGNKVYNLKLPKFSIENKRDIKSIAEMMAPSMFNPDNASFKHMTRDPLYIYKMFQNAKIDVDEQGTVAEASTIMVATARSSPEELEFNTPFVFIIRHDITGFILFMGKVESP

SEQ ID NO: 67 - protein, 81 aa, Vaccinia virus
MGHIITYCQVHTNISILIRKAYHIIFFVIDCDCISLQFSNYVHHGNRFRTVLISKTSIACFSDIKRILPCTFKIYSINDCP

SEQ ID NO: 68 - protein, 88 aa, Vaccinia virus; identical to SEQ ID NO: 16

SEQ ID NO: 69 - protein, 134 aa, Vaccinia virus; identical to SEQ ID NO: 52

SEQ ID NO: 70 - protein, 149 aa, Vaccinia virus; identical to SEQ ID NO: 20

SEQ ID NO: 71 - protein, 226 aa, Vaccinia virus
MLSMFMCNNIVDYVDDIDNGIVQDIEDEASNNVDRDYVYPLPENMVYRFDKSTNILDYLSTERDHVMMAVRYYMSKQRLDDLYRQLPTKTRSYIDIINIYCDKVSNDYNRDMNIMYDMASTKSFTVYDINNEVNTILMDNKGLGVRLATISFITELGRRCMNPVKTIKMFTLLSHTICDDCFVDYITDISPPDNTIPNTSTREYLKLIGITAIMFATYKTLKYMIG

SEQ ID NO: 72 - protein, 147 aa, Vaccinia virus
MFNMNINSPVRFVKETNRAKSPTRQSPGAAGYDLYSAYDYTIPPGERQLIKTDISMSMPKICYGRIAPRSGLSLKGIDIGGGVIDEDYRGNIGVILINNGKCTFNVNTGDRIAQLIYQRIYYPELEEVQSLDSTDRGDQGFGSTGLR

SEQ ID NO: 73 - protein, 480 aa, Vaccinia virus
MPIFVNTVYCKNILALSMTKKFKTIIDAIGGNIIVNSTILKKLSPYFRTHLRQKYTKNKDPVTRVCLDLDIHSLTSIVIYSYTGKVYIDSHNVVNLLRASILTSVEFIIYTCINFILRDFRKEYCVECYMMGIEYGLSNLLCHTKNFIAKHFLELEDDIIDNFDYLSMKLILESDELNVPDEDYVVDFVIKWYIKRRNKLGNLLLLIKNVIRSNYLSPRGINNVKWILDCTKIFHCDKQPRKSYKYPFIEYPMNMDQIIDIFHMCTSTHVGEVVYLIGGWMNNEIHNNAIAVNYISNNWIPIPPMNSPRLYASGIPANNKLYVVGGLPNPTSVERWFHGDAAWVNMPSLLKPRCNPAVASINNVIYVMGGHSETDTTTEYLLPNHDQWQFGPSTYYPHYKSCALVFGRRLFLVGRNAEFYCESSNTWTLIDDPIYPRDNPELIIVDNKLLLIGGFYRESYIDTIEVYNHHTYSWNIWDGK

SEQ ID NO: 74 - protein, 506 aa, Vaccinia virus
MESVTFSINGEIIQVNKEIITASPYNFFKRIQEHHINDEVIILNGINYHAFESLLDYMRWKKINITINNVEMILVAAVIIDVTPVVDLCVKTMIHNINSTNCIRMFNFSKRYGIKKLYNASMSEIINNITAVTSDPEFGKLSKDELTTILSHEDVNVNHEDVTAMILLKWIHKNPNDVDIINILHPKFMTNTMRNAISLLGLTISKSTKPVTRNGIKHNIVVIKNSDYISTITHYSPRTEYWTIVGNTDRQFYNANVLHNCLYIIGGMINNRHVYSVSRVDLETKKWKTVTNMSSLKSEVSTCVNNGKLYVIGGLEFSISTGVAEYLKHGTSKWIRLPNLITPRYSGASVFVNDDIYVMGGVYTTYEKYVVLNDVECFTKNRWIKKSPMPRHHSIVYAVEYDGDIYAITGITHETRNYLYKYIVKEDKWIELYMYFNHVGKMFVCSCGDYILIIADAKYEYYPKSNTWNLFDMSTRNIEYYDMFTKDETHKSLPSFLSNCEKQFLQ

SEQ ID NO: 75 - protein, 224 aa, Vaccinia virus
MVKNNKISNSCRMIMSTNPNNILMRHLKNLTDDEFKCIIHRSSDFLYLSDRDYTSITKETLVSEIVEEYPDDCNKILAIIFLVLDKDIDVDIKTKLKPKPAVRFAILDKMTEDIKLTDLVRHYFRYIEQDIPLGPLFKKIDSYRTRAINKYSKELGLATEYFNKYGHLMFYTLPIPYNRFFCRNSIGFLAVLSPTIGHVKAFYKFIEYVSIDDRRKFKKELMSK

SEQ ID NO: 76 - protein, 117 aa, Vaccinia virus; identical to SEQ ID NO: 23

SEQ ID NO: 77 - protein, 175 aa, Vaccinia virus
MTSSAMDNNEPKVLEMVYDATILPEGSSMDPNIIDCINRHINMCIQRTYSSSIIAILDRFLTMNKDELNNTQCHIIKEFMTYEQMAIDHYGGYVNAILYQIRKRPNQHHTIDLFKKIKRTRYDTFKVDPVEFVKKVIGFVSILNKYKPVYSYVLYENVLYDEFKCFIDYVETKYF

SEQ ID NO: 78 - protein, 72 aa, Vaccinia virus
MLHNPTSETMYLTMNAIKKDKLDKSIIIPFIAYFVLMHPDFCKNRRYFTSYKRFVTDYVHEGVSYEVFDDYF

SEQ ID NO: 79 - protein, 214 aa, Vaccinia virus
MSIGFEARIVDKFGKNHIHRHLMSDNPKASTISWMMKLGISPSKPDHDGNTPLHIVCSKTVKYVDIIDLLLPSTDVNKQNKFGDSPLTLLIKTLSLAHLINKLLSTSNVITDQTVNICIFYDRDDVLEIINDKGKQYDFKMAVEVGSIKCVKYLLDNDIICEDAMYYAVLSEYKTMVDYLLFNHFSVDSVVNGHTCMSECVKLNNRHFIEADVT

SEQ ID NO: 80 - protein, 161 aa, Vaccinia virus
MIFVIESKLLQIYRNRNRNINFYTTMDNIMSAEYYLSLYAKYNSKNLDVFRNMLQAIEPSGNNYHILHAYCGIKGLDERFVEELLHRGYSPNETDDDGNYPLHIASKINNNRIVAMLLTHGADPNACDKHNKTPLYYLSGTDDEVIERINLLVQYGAKINN

SEQ ID NO: 81 - protein, 220 aa, Vaccinia virus; identical to SEQ ID NO: 22

SEQ ID NO: 82 - protein, 284 aa, Vaccinia virus
MDLSRINTWKSKQLKSFLSSKDTFKADVHGHSALYYAIADNNVRLVCTLLNAGALKNLLENEFPLHQAATLEDTKIVKILLFSGLDDSQFDDKGNTALYYAVDSGNMQTVKLFVKKNWRLMFYGKTGWKTSFYHAVMLNDVSIVSYFLSEIPSTFDLAILLSCIHITIKNGHVDMMILLLDYMTSTNTNNSLLFIPDIKLAIDNKDIEMLQALFKYDINIYSANLENVLLDDAEIAKMIIEKHVEYKSDSYTKDLDIVKNNKLDEIISKNKELRLMYVNCVKKN

SEQ ID NO: 83 - protein, 364 aa, Vaccinia virus
MIALLILSLTCSVSTYRLQGFTNAGIVAYKNIQDDNIVFSPFGYSFSMFMSLLPASGNTRIELLKTMDLRKRDLGPAFTELISGLAKLKTSKYTYTDLTYQSFVDNTVCIKPSYYQQYHRLNFRRDAVNKINSIVERRSGMSNVVDSNMLDNNTLWAIINTIYFKGIWQYPFDITKTRNASFTNKYGTKTVPMMNVVTKLQGNTITIDDKEYDMVRLPYKDANISMYLAIGDNMTHFTDSITAAKLDYWSFQLGNKVYNLKLPKFSIENKRDIKSIAEMMAPSMFNPDNASFKHMTRDPLYIYKMFQNAKIDVDEQGTVAEASTIMVATARSSPEKLEFNTPFVFIIRHDITGFILFMGKVESP

SEQ ID NO: 84 - protein, 88 aa, Vaccinia virus
MLAFCYSLPNAGDVIKGRVYENDYALYIYLFDYPHFEAILAESVKMHMDRYVEYRDKLVGKTVKVKVIRVDYTKGYIDVNYKRMCRHQ

SEQ ID NO: 85 - protein, 424 aa, Vaccinia virus
MNPDNTIAVITETIPIGMQFDKVYLSTFNMWREILSNTTKTLDISSFYWSLSDEVGTNFGTIILNEIVQLPKRGVRVRVAVNKSNKPLKDVERLQMAGVEVRYIDITNILGGVLHTKFWISDNTHIYLGSANMDWRSLTQVKELGIAIFNNRNLAADLTQIFEVYWYLGVNNLPYNWKNFYPSYYNTDHPLSINVSGVPHSVFIASAPQQLCTMERTNDLTALLSCIRNASKFVYVSVMNFIPIIYSKAGKILFWPYIEDELRRSAIDRQVSVKLLISCWQRSSFIMRNFLRSIAMLKSKNINIEVKLFIVPDADPPIPYSRVNHAKYMVTDKTAYIGTSNWTGNYFTDTCGASINITPDDGLGLRQQLEDIFMRDWNSKYSYELYDTSPTKRCKLLKNMKQCTNDIYCDEIQPEKEIPEYSLE

SEQ ID NO: 86 - protein, 171 aa, Vaccinia virus
MGATISILASYDNPNLFTAMILMSPLVNADAVSKLNLLAAKLMGTITPNAPVGKLCPESVSRDMDKVYKYQYDPLINHEKIKAGFASQVLKATNKVRKIISKINTPPTLILQGTNNEISDVLGAYYFMQHANCNREIKIYEGAKHHLHKETDEVKKSVMKEIETWIFNRVK

SEQ ID NO: 87 - protein, 81 aa, Vaccinia virus; identical to SEQ ID NO: 19

SEQ ID NO: 88 - protein, 149 aa, Vaccinia virus; identical to SEQ ID NO: 20

SEQ ID NO: 89 - protein, 226 aa, Vaccinia virus
MLSMFMCNNIVDYVDDIDNGIVQDIEDEASNNVDHDYVYPLPENMVYRFDKSTNILDYLSTERDHVMMAVRYYMSKQRLDDLYRQLPTKTRSYIDIINIYCDKVSNDYNRDMNIMYDMASTKSFTVYDINNEVNTILMDNKGLGVRLATISFITKLGRRCMNPVKTIKMFTLLSHTICDDCFVDYITDISPPDNTIPNTSTREYLKLIGITAIMFATYKTLKYMIG

SEQ ID NO: 90 - protein, 147 aa, Vaccinia virus; identical to SEQ ID NO: 12

SEQ ID NO: 91 - protein, 480 aa, Vaccinia virus; identical to SEQ ID NO: 73

SEQ ID NO: 92 - protein, 512 aa, Vaccinia virus
MESVIFSINGEIIQVNKEIITASPYNFFKRIQDHHLKDEAIILNGINYHAFESLLDYMRWKKINITINNVEMILVAAIIIDVPPVVDLCVKTMIHNINFTNCIRMFNFSKRYGIKKLYNASMSEIINNITAVTSDPEFGKLSKDELTTILSHEDVNVNHEDVTAMILLKWIHKNPNDVDIINILHPKFMTNTMRNAISLLGLTISKSTKPVTRNGIKHNIVVIKNSDYISTITHYSPRTEYWTIVGNTDRQFYNANVLHNCLYIIGGMINNRHVYSVSRVDLKTKKWKTVTNMSSLKSEVSTCVNDGKLYVIGGLEFSISTGVAEYLKHGTSKWIRLPNLITPRYSGASVFVNDDIYVMGGVYTTYEKYVVLNDVECFTKNRWIKKSPMPRHHSIVYAVEYDGDIYVITGITHETRNYLYKYIVKEDKWIELYMYFNHVGKMFVCSCGDYILIIADAKYEYYPKSNTWNLFDMSTRNIEYYDMFTKDETPKCNVTHKSLPSFLSNCEKQFLQ

SEQ ID NO: 93 - protein, 224 aa, Vaccinia virus
MVKNNKISNSCRMIMSTNPNNILMRHLKNLTDDEFKCIIHRSSDFLYLSDSDYTSITKETLVSEIVEEYPDDCNKILAIIFLVLDKDIDVDIETKLKPKPAVRFAILDKMTADIKLTDLVRHYFRYIEQDIPLGPLFKKIDSYRTRAINKYSKELGLATEYFNKYGHLMFYTLPIPYNRFFCRNSIGFLAVLSPTIGHVKAFYKFIEYVSIDDRRKFKKELMSK

SEQ ID NO: 94 - protein, 117 aa, Vaccinia virus; identical to SEQ ID NO: 23

SEQ ID NO: 95 - protein, 175 aa, Vaccinia virus
MTSSAMDNNEPKVLEMVYDATILPEGSSMDPNIMDCINRHINMCIQRTYSSSIIAILDRFLTMNKDELNNTQCHIIKEFMTYEQMAIDHYGEYVNAILYQIRKRPNQHHTIDLFKKIKRTRYDTFKVDPVEFVKKVIGFVSILNKYKPVYSYVLYENVLYDEFKCFIDYVETKYF

SEQ ID NO: 96 - protein, 470 aa, Vaccinia virus
MIFVIESKLLQIYRNRNINFYTTMDNIMSAEYYLSLYAKYNSKNLDVFRNMLQAIEPSGNNYHILHAYCGIKGLDERFVEELLHRGYSPNETDDDGNYPLHIASKINNNRIVAMLLTHGADPNACDKQHKTPLYYLSGTDDEVIERINLLVQYGAKINNSVDEEGCGPLLACTDPSERVFKKIMSIGFEARIVDKFGKNHIHRHLMSDNPKASTISWMMKLGISPSKPDHDGNTPLHIVCSKTVKNVDIIDLLLPSTDVNKQNKFGDSPLTLLIKTLSPAHLINKLLSTSNVITDQTVNICIFYDRDDVLEIINDKGKQYDSTDFKMAVEVGSIRCVKYLLDNDIICEDAMYYAVLSEYETMVDYLLFNHFSVDSVVNGHTCMSECVRLNNPVILSKLMLHNPTSETMYLTMKAIEKDRLDKSIIIPFIAYFVLMHPDFCKNRRYFTSYKRFVTDYVHEGVSYEVFDDYF

SEQ ID NO: 97 - protein, 220 aa, Vaccinia virus; identical to SEQ ID NO: 22

SEQ ID NO: 98 - protein, 284 aa, Vaccinia virus
MDLSRINTWKSKQLKSFLSSKDAFKADINGHSALYYAIADNNVRLVCTLLNAGALKNLLENEFPLHQAATLEDTKIVKILLFSGLDDSQFDDKGNTALYYAVDSGNMQTVKLFVKKNWRLMFYGKTGWKTSFYHAVMLNDVSIVSYFLSEIPSTFDLAILLSCIHITIKNGHVDMMILLLDYMTSTNTNNSLLFIPDIKLAIDNKDIEMLQALFKYDINIYSANLENVLLDDAEIAKMIIEKHVEYKSDSYTKDLDIVKNNKLDEIISKNKELKLMYVNCVKKN

SEQ ID NO: 99 - protein, 309 aa, Vaccinia virus
IELLKTMDLRKRDLGPAFTELISGLAKLKTSKYTYTDLTYQSFVDNTVCIKPSYYQQYHRFGLYRLNFRRDAVNKINSIVERRSGMSNVVDSNMLDNNTLWAIINTIYFKGIWQYPFDITKTRNASFTNKYGTKTVPMMNVVTKLQGNTITIDDEEYDMVRLPYKDANISMYLAIGDNMTHFTDSITAAKLDYWSSQLGNKVYNLKLPKFSIENKRDIKSIAEMMAPSMFNPDNASFKHMTRDPLYIYKMFQNAKIDVDEQGTVAEASTIMVATARSSPEKLEFNTPFVFIIRHDITGFILFMGKVESP

SEQ ID NO: 100 - protein, 88 aa, Vaccinia virus
MLAFCYSLPNAGDVIKGRVYENDYALYIYLFDYPHSEAILAESVKMHMDRYVEYRDKLVGKTVKVKVIRVDYTKGYIDVNYKRMCRHQ

SEQ ID NO: 101 - protein, 424 aa, Vaccinia virus; identical to SEQ ID NO: 85

SEQ ID NO: 102 - protein, 175 aa, Vaccinia virus
MGHSMGATISILASYDNPNLFTAMILMSPLVNADAVSRLNLLAAKLMGTITPNAPVGKLCPESVSRDMDKVYKYQYDPLINHEKIKAGFASQVLKATNKVRKIISKINTPPTLILQGTNNKISDVLGAYYFMQHANCNREIKIYEGAKHHLHKETDEVKKSVMKEIETWIFNRVK

SEQ ID NO: 103 - protein, 81 aa, Vaccinia virus; identical to SEQ ID NO: 19

SEQ ID NO: 104 - protein, 149 aa, Vaccinia virus; identical to SEQ ID NO: 20

SEQ ID NO: 105 - protein, 226 aa, Vaccinia virus; identical to SEQ ID NO: 11

SEQ ID NO: 106 - protein, 147 aa, Vaccinia virus
MFNMNINSPVRFVKETNRAKSPTRQSPGAAGYDLYSAYDYTIPPGERQLIKTDISMSMPKFCYGRIAPRSGLSLKGIDIGGGVIDEDYRGNIGVILINNGKCTFNVNTGDRIAQLIYQRIYYPELEEVQSLDSTNRGDQGFGSTGLR

SEQ ID NO: 107 - protein, 480 aa, Vaccinia virus
MPIFVNTVYCKNILALSMTKKFKTIIDAIGGNIIVNSTILKKLSPYFRTHLRQKYTKNKDPVTRVCLDLDIHSLTSIVIYSYTGKVYIDSHNVVNLLRASILTSVEFIIYTCINFILRDFRKEYCVECYMMGIEYGLSNLLCHTKNFIAKHFLELEDDIIDNFDYLSIKLILESDELNVPDEDYVVDFVIKWYIKRRNKLGNLLLLIKNVIRSNYLSPRGINNVKWILDCTKIFHCDKQPRKSYKYPFIEYPMNMDQIIDIFHMCTSTHVGEVVYLIGGWMNNEIHNNAIAVNYISNNWIPIPPMNSPRLYASGIPANNKLYVVGGLPNPTSVERWFHGDAAWVNMPSLLKPRCNPAVASINNVIYVMGGHSETDTTTEYLLPNHDQWQFGPSTYYPHYKSCALVFGRRLFLVGRNAEFYCESSNTWTLIDDPIYPRDNPELIIVDNKLLLIGGFYRESYIDTIEVYNHHTYSWNIWDGK

SEQ ID NO: 108 - protein, 222 aa, Vaccinia virus; identical to SEQ ID NO: 2

SEQ ID NO: 109 - protein, 149 aa, Vaccinia virus; identical to SEQ ID NO: 3

SEQ ID NO: 110 - protein, 91 aa, Vaccinia virus
MYNSSIHTPEYDVIIHVIEHLKHHKQCVQTVTSGMVFTSPVSSSICTKSDDGRNLSDGFLLIRYITTDDFCTIFDIIPRHIFYQLANVDEH

SEQ ID NO: 111 - protein, 30 aa, Vaccinia virus; identical to SEQ ID NO: 4

SEQ ID NO: 112 - protein, 75 aa, Vaccinia virus
MVIIPGVRCLSLLFLRRRCPLHIISAFTLLAINALILGHTISPVDLSFTICGYEIKSIFDSETDTIVKFNDIMSQ

SEQ ID NO: 113 - protein, 340 aa, Vaccinia virus; identical to SEQ ID NO: 5

SEQ ID NO: 114 - protein, 574 aa, Vaccinia virus; identical to SEQ ID NO: 6

SEQ ID NO: 115 - protein, 353 aa, Vaccinia virus; identical to SEQ ID NO: 7

SEQ ID NO: 116 - protein, 127 aa, Vaccinia virus; identical to SEQ ID NO: 8

SEQ ID NO: 117 - protein, 91 aa, Vaccinia virus
MSLESFIITTFNNNSSTNIDNMCHLYVKVCPSSLLFRLFVECCDINKLVEGTTPLHCYLMNEGFESSVLKNLLKEYVMNTFNVHDIHYTNI

SEQ ID NO: 118 - protein, 181 aa, Vaccinia virus
MISLSFLIHNPLKKWKLKPSISINGYRSTFTMAFPCAQFRPCHCHATKDSLNTVADVRHCLTEYILWVSHRWTHRESAGSLYRLLISFRTDATELFGGELKDSLPWDNIDNCVEIIKCFIRNDSMKTAEELRAIIGLCTQSAIVSGRVFNDKYIDILLMLRKILNENDYLTLLDHIRTAKY

SEQ ID NO: 119 - protein, 386 aa, Vaccinia virus
MIAFIIFREIGIISTRIAMDYCGRECTILCRLLDEDVTYKKIKLEIETCHNLSKHIDRRGNNALHCYVSNKCDTDIKIVRLLLSRGVERLCRNNEGLTPLGAYSKHRYVKSQIVHLLISSYSNSSNELKSNINDFDLSSDNIDLRLLKYLIVDKRIRPSKNTNYAINGLGLVDIYVTTPNPRPEVLLWLLKSECYSTGYVFRTCMYNSDMCKNSLHYYISSHRESQSLSKDVIKCLINNNVSIHGRDEGGSLPIQYYWSFSTIDIEIVKLLLIKDVDTCRVYDVSPILEAYYLNKRFRVTPYNVDMEIVNLLIERRHTLVDVMRSITSYDSREYNHYIIDNILKRFRQQDESIVQAMLINYLHYGDMVVRCMLDNGQQLSSARLLC

SEQ ID NO: 120 - protein, 150 aa, Vaccinia virus
MYGLILSRFNNCGYHCYETILIDVFDILSKYMDDIDMIDNENKTLLYYAVDVNNIQFAKRLLEYGASVTTSRSIINTAIQKSSYQRENKTRIVDLLLSYHPTLETMIDAFNRDIRYLYPEPLFACIRYALILDDDFPSKVSMISPVIIRN

SEQ ID NO: 121 - protein, 91 aa, Vaccinia virus
MRRCIHIKERKIHMTNIVDRNVTFILTVVHKYVRYVPHTVANDAHNLVHLAHLIHFIIYFFIIRDVRKKKKKKKKNRTIYFFSNVYARHIK

SEQ ID NO: 122 - protein, 259 aa, Vaccinia virus
MSRINITKKIYCSVFLFLFLFLSYISNYEKVNDEMYEMGEMDEIVSIVRDSMWYIPNVFMDDGKNEGHVSVNNVCHMYFTFFDVDTSSHLFKLVIKHCDLNKRGNSPLHCYTMNTRFNPSVLKILLHHGMRNFDSKDEKGHHYLIHSLSIDNKIFDILTDTIDDFSKSSDLLLCYLRYKFNGSLNYYVLYKGSDPNCADEDELTSLHYYCKHISTFYKSNYYKLSHTKMRAEKRFIYAIIDYGANINAVTHLPSTVYQT

SEQ ID NO: 123 - protein, 103 aa, Vaccinia virus
MEQTLTRLHTYLQQYTKHSPRVVYALLSRGYVIILIVHPSWNDCATGHILIMLLNWHEQKEEGQHLLYLFIKHNQGYTLNILRYLLDRFDIQKDEYIYRLSKL

SEQ ID NO: 124 - protein, 113 aa, Vaccinia virus
MLPHTSDTTSTFRLKTVFDLVFENRNIIYKADVVNDIIHHRLKVSLPMIKSLFYKMSEFSPYDDYYVKKILAYCLLRDESFAELHSKFCLNEDYKSVFMKNISFDKIDSIIVT

SEQ ID NO: 125 - protein, 122 aa, Vaccinia virus
MKSVLYSYILFLSCIIINGRDIAPHAPSDGKCKDNEYKRHNLCPGTYASRLCDSKTNTQCTPCGSGTFTSRNNHLPACLSCNGRRDRVTLLTIESVNALPDIIVFSKDHPDARHVFPKQNVE

SEQ ID NO: 126 - protein, 244 aa, Vaccinia virus
MHVPASLQQSSSSSSSCTEEENKHHMGIDVIIKVTKQDQTPTNDKICQSVTEITESESDPDPEVESEDDSTSVEDVDPPTTYYSIIGGGLRMNFGFTKCPQIKSISESADGNTVNARLSSVSPGQGKDSPAITREEALAMIKDCEVSIDIRCSEEEKDSDIKTHPVLGSNISHKKVSYEDIIGSTIVDTKCVKNLEFSVRIGDMCKESSELEVKDGFKYVDGSASEGATDDTSLIDSTKLKACV

SEQ ID NO: 127 - protein, 345 aa, Vaccinia virus
MDIFREIASSMKGENVFISPASISSVLTILYYGANGSTAEQLSKYVEKEENMDKVSAQNISFKSINKVYGRYSAVFKDSFLRKIGDKFQTVDFTDCRTIDAINKCVDIFTEGKINPLLDEPLSPDTCLLAISAVYFKAKWLTPFEKEFTSDYPFYVSPTEMVDVSMMSMYGKAFNHASVKESFGNFSIIELPYVGDTSMMVILPDKIDGLESIEQNLTDTNFKKWCNSLEATFIDVHIPKFKVTGSYNLVDTLVKSGLTEVFGSTGDYSNMCNSDVSVDAMIHKTYIDVNEEYTEAAAATCALVSDCASTITNEFCVDHPFIYVIRHVDGKILFVGRYCSPTTNC

SEQ ID NO: 128 - protein, 149 aa, Vaccinia virus
MTANFSTHVFSPQHCGCDRLTSIDDVRQCLTEYIYWSSYAYRNRQCAGQLYSTLLSFRDDAELVFIDIRELVKNMPWDDVKDCAEIIRCYIPDEQKTIREISAIIGLCAYAATYWGGEDHPTSNSLNALFVMLEMLNYVDYNIIFRRMN

SEQ ID NO: 129 - protein, 326 aa, Vaccinia virus
MSILPVIFLSIFFYSSFVQTFNAPECIDKGQYFASFMELENEPVILPCPQINTLSSGYNILDILWEKRGADNDRIIPIDNGSNMLILNPTQSDSGIYICITTNETYCDMMSLNLTIVSVSESNIDLISYPQIVNERSTGEMVCPNINAFIASNVNADIIWSGHRRLRNKRLKQRTPGIITIEDVRKNDAGYYTCVLEYIYGGKTYNVTRIVKLEVRDKIIPSTMQLPDGIVTSIGSNLTIACRVSLRPPTTDADVFWISNGMYYEEDDGDGNGRISVANKIYMTDKRRVITSRLNINPVKEEDATTFTCMAFTIPSISKTVTVSIT

SEQ ID NO: 130 - protein, 340 aa, Vaccinia virus
MSRKFMQVYEYDREQYLDEFIEDRYNDSFITSPEYYSAEKYMCRYTTLNHNCINVRRCALDSKLLHDIITNCKIYNNIELVRATKFVYYLDLIKCNWVSKVGDSVLYPVIFITHTSTRNLDKVSVKTYKGVKVKKLNRCADHAIVINPFVKFKLTLPNKTSHAKVLVTFCKLKTDITPVEAPLPGNVLVYTFPDINKRIPGYIHLNIEGCIDGMIYINSSKFACVLKLHRSMYRIPPFPIDICSCCSQYINYDIEIPIHDLIKDVAIFKNKETVYYLKLNNKTIARFTYFNNIDTAITQEHEYVKIALGIVCKLMINNMHSIVGVNHSNTFVNCLLEDNV

SEQ ID NO: 131 - protein, 574 aa, Vaccinia virus
MSRRLIYVLNINRESTHKIQENEIYTYFSHCNIDHTSTELDFVVKNYDLNRRQPVTGYTALHCYLYNNYFTNDVLKILLNHGVDVTMKTSSGRMPVYILLTRCCNISHDVVIDMIDKDKNHLLHRDYSNLLLEYIKSRYMLLKEEDIDENIVSTLLDKGIDPNFKQDGYTALHYYYLCLAHVYKPGECRKPITIKKAKRIISLFIQHGANLNALDNCGNTPFHLYLSIEMCNNIHMTKMLLTFNPNFEICNNHGLTPILCYITSDYIQHDILVMLIHHYETNVGEMPIDERRIIVFEFIKTYSTRPADSITYLMNRFKNIDIYTRYEGKTLLHVACEYNNTHVIDYLIRINGDINALTDNNKHATQLIIDNKENSPYTINCLLYILRYIVDKNVIRSLVDQLPSLPIFDIKSFEKFISYCILLDDTFYNRHVRNRDSKTYRYAFSKYMSFDKYDGIITKCHKETILLKLSTVLDTTLYAVLRCHNSKKLRRYLTELKKYNNDKSFKIYSNIMNERYLNVYYKDMYVSKVYDKLFPVFTDKNCLLTLLPSEIIYEILYMLTINDLYNISYPPTKV

SEQ ID NO: 132 - protein, 351 aa, Vaccinia virus
MTMKMMVHIYFVSLLLLLFHSYAIDIENEITEFFNKMRDTLPAKDSKWLNPACMFGGTMNDIAALGEPFSAKCPPIEDSLLSHRYKDYVVKWERLEKNRRRQVSNKRVKHGDLWIANYTSKFSNRRYLCTVTTKNGDCVQGIVRSHIRKPPSCIPKTYELGTHDKYGIDLYCGILYAKHYNNITWYKDNKEINIDDIKYSQTGKELIIHNPELEDSGRYDCYVHYDDVRIKNDIVVSRCKILTVIPSQDHRFKLILDPKINVTIGEPANITCTAVSTSLLIDDVLIEWENPSGWLIGFDFDVYSVLTSRGGITEATLYFENVTEEYIGNTYKCRGHNYYFEKTLTTTVVLE

SEQ ID NO: 133 - protein, 56 aa, Vaccinia virus
MHVIDVDVRLYMSTFIIIDQSTENTSIDTTVTINIIYLAIMKIIMNIIMMIMIELV

SEQ ID NO: 134 - protein, 53 aa, Vaccinia virus
MNSESDNISIKTEYEFYDETQDQSTQLVGYDIKLKTNEDDFMAMIDQWVSMII

SEQ ID NO: 135 - protein, 309 aa, Vaccinia virus
MEMYPRHRYSKHSVFKGFSDKVRKNDLDMNVVKELLSNGASLTIKDSSNKDPITVYFRRTIMNLEMIDERKYIVHSYLKNYKNFDYPFFRKLVLTNKHCLNNYYNISDSKYGTPLHILASNKKLITPNYMKLLVYNGNDINARGEDTQMRTPLHKYLCKFVYHNIEYGIRYYNEKIIDAFIELGADLTIPNDDGMIPVVYCIHSNAEYGYNNITNIKIIRKLLNLSRRASHNLFRDRVMHDYISNTYIDLECLDIIRSLDGFDINGYFEGRTPLHCAIQHNFTQIAKYLLDRGADIVVPNTLIIHQYIQ

SEQ ID NO: 136 - protein, 134 aa, Vaccinia virus
MEEDTNISNKVIRYNTVNNIWETLPNFWTGTINPGVVSHKDDIYVVCDIKDEKNVKTCIFRYNTNTYNGWELVTTTESRLSALHTILYNNTIMMLHCYESYMLQDTFNVYTREWNHMCHQHSNSYIMYNILPIY

SEQ ID NO: 137 - protein, 353 aa, Vaccinia virus
MDIFKELILKHTDENVLISPVSILSTLSILNHGAAGSTAEQLSKYIENMNENTPDDNNDMDVDIPYCATLATANKIYGSDSIEFHASFLQKIKDDFQTVNFNNANQTKELINEWVKTMTNGKINSLLTSPLSINTRMTVVSAVHFKAMWKYPFSKHLTYTDKFYISKNIVTSVDMMVSTENNLQYVHINELFGGFSIIDIPYEGNSSMVIILPDDIEGIYNIEKNITDEKFKKWCGMLSTKSIDLYMPKFKVEMTEPYNLVPILENLGLTNIFGYYADFSKMCNETITVEKFLHTTFIDVNEEYTEASAVTGVFMTNFSMVYRTKVYINHPFMYMIKDNTGRILFIGKYCYPQ

SEQ ID NO: 138 - protein, 190 aa, Vaccinia virus
MMIYGLIACLIFVTSSIASPLYIPVIPPISEDKSFNSVEVLVSLFRDDQKDYTVTSQFNNYTIDTKDWTIGVLSTPDGLDIPLTNITYWSRFTIGRALFKSESEDIFQKKMSILGVSIECKKSSTLLTFLTVRKMTRVFNKFPDMAYYRGDCLKAVYVTMTYKNTKTGETDYTYLSNGGLPAYYRNGVDG

SEQ ID NO: 139 - protein, 62 aa, Vaccinia virus
MKLFTQNDRYFGLLDSCTHIFCITCINIWHKTRRETGASDNCPICRTRFRNITMSKFYKLVN

SEQ ID NO: 140 - protein, 184 aa, Vaccinia virus
MEFDPAKINTSSIDHVTILQYIDEPNDIRLTVCIIRNINNITYYINITKINTHLANQFRAWKKRIAGRDYMTNLSRDTGIQQSKLTETIRNCQKNRNIYGLYIHYNLVINVVIDWITDVIVQSILRGLVNWYIANNTYTPNTPNNTTTISELDIIKILDKYEDVYRVSKEKECGICYEVVYSKR

SEQ ID NO: 141 - protein, 331 aa, Vaccinia virus
MDIYDDKGLQTIKLFNNEFDCIRNDIRELFKHVTDSDSIQLPMEDNSDIIENIRKILYRRLKNVECVDIDSTITFMKYDPNDDNKRTCSNWVPLTNNYMEYCLVIYLETPICGGKIKLYHPTGNIKSDKDIMFAKTLDFKSKKVLTGRKTIAVLDISVSYNRSMTTIHYNDDVDIDIHTDKNGKELCYCYITIDDHYLVDVETIGVIVNRSGKCLLVNNHLGIGIVKDKRISDSFGDVCMDTIFDFSEARELFSLTNDDNRNIAWDTDKLDDDTDIWTPVTEDDYKFLSRLVLYAKSQSDTVFDYYVLTGDTEPPTVFIFKVTRFYFNMPK

SEQ ID NO: 142 - protein, 140 aa, Vaccinia virus
MSMKYLMLLFAAMIIRSFADSGNAIETTSPEITNATTDIPAIRLCGPEGDGYCLHGDCIHARDIDGMYCRCSHGYTGIRCQHVVLVDYQRSENPNTTTSYIPSPGIMLVLVGIIIITCCLLSVYRFTRRTKLPIQDMVVP

SEQ ID NO: 143 - protein, 112 aa, Vaccinia virus
MDEIVRIVRDSMWYIPNVFMDDGKNEGHVSVNNVCHMYFTFFDVDTSSHLFKLVIKHCDLNKRGNSPLHCYTMNTRFNPSVLKILLHHGMRNFDSKDEKGHHYQSITRSLIY

SEQ ID NO: 144 - protein, 109 aa, Vaccinia virus
MLFYLEEPIRGYVIILIVHPSWNDCATGHILIMLLNWHEQKEEGQHLLYLFIKHNQGYTLNILRYLLDRFDIQKDEYYNTAFQNCNNNVASYIGYDINLPTKDGIRLGV

SEQ ID NO: 145 - protein, 64 aa, Vaccinia virus
MLPHTSDTTSTFRLKTVFDLVFENRNIIYKADVVNDIIHHRLKVSLPMIKSLFYKMSLPTTITT

SEQ ID NO: 146 - protein, 48 aa, Vaccinia virus
MYDDLIEQCHLSMERKSKLVDKALNKLESTIGQSRLSYLPPEIMRNII

SEQ ID NO: 147 - protein, 122 aa, Vaccinia virus
MKSVLYSYILFLSCIIINGRDIAPHAPSDGKCKDNEYKRHNLCPGTYASRLCDSKTNTQCTPCGSGTFTSRNNHLPACLSCNGRRDRVTRLTIESVNALPDIIVFSKDHPDARHVFPKQNVE

SEQ ID NO: 148 - protein, 72 aa, Vaccinia virus
MDSLRPVVVVNWIQINFHIDIVKGITGYGFAFICGRDGVRICSETTRRTDDVSGYSVSYSTFCLGNTCLASG

SEQ ID NO: 149 - protein, 61 aa, Vaccinia virus
MWKLICIQLTTTTGLSESISTSELTITMNHKDCNPVFREEYFSVLNKVATSGFFTGERCAL

SEQ ID NO: 150 - protein, 244 aa, Vaccinia virus
MHVPASLQQSSSSSSSCTEEENKHHMGIDVIIKVTKQDQTPTNDKICQSVTEITESESDPDPEVESEDDSTSVEDVDPPTTYYSIIGGGLRMNFGFTKCPQIKSISESADGNTVNARLSSVSPGQGKDSPAITHEEALAMIKDCEVSIDIRCSEEEKDSDIKTHPVLGSNISHKKVSYEDIIGSTIVDTKCVKNLEFSVRIGDMCKESSELEVKDGFKYVDGSASEGATDDTSLIDSTKLKACV

SEQ ID NO: 151 - protein, 222 aa, Vaccinia virus
MNHCLLAISAVYFKAKWLTPFEKEFTSDYPFYVSPTEMVDVSMMSMYGKAFNHASVKESFGNFSIIELPYVGDTSMMVILPDKIDGLESIEQNLTDTNFKKWCDFMDAMFIDVHIPKFKVTGSYNLVDTLVKSGLTEVFGSTGDYSNMCNLDVSVDAMIHKTYIDVNEEYTEAAAATCALVSDCASTITNEFCVDHPFIYVIRHVDGKILFVGRYCSPTTNC

SEQ ID NO: 152 - protein, 149 aa, Vaccinia virus; identical to SEQ ID NO: 3

SEQ ID NO: 153 - protein, 91 aa, Vaccinia virus; identical to SEQ ID NO: 110

SEQ ID NO: 154 - protein, 290 aa, Vaccinia virus
MELENEPVILPCPQINTLSSGYNILDILWEKRGADNDRIIPIDNGSNMLILNPTQSDSGIYICITTNETYCDMMSLNLTIVSVLESNIDLISYPQIVNERSTGEMVCPNINAFIASNVNADIIWSGHRRLRNKRLKQRTPGIITIEDVRKNDAGYYTCVLEYIYRGKTYNVTRIVKLEVRDKIIPSTMQLPDGIVTSIGSNLTIACRVSLRPPTTDADVFWISNGMYYEEDDGDGNGRISVANKIYMTDKRRVITSRLNINPVKEEDATTFTCMAFTIPSISKTVTVSIT

SEQ ID NO: 155 - protein, 75 aa, Vaccinia virus
MVIIPGVRCLSLLFLRRRCPLHIISAFTLLAINALILGHTISPVDLSFTICGYEIRSIFDSKTDTIVKFNDIMSQ

SEQ ID NO: 156 - protein, 340 aa, Vaccinia virus
MSRKFMQVYEYDREQYLDEFIEDRYNDSFITSPEYYSAEKYMCRYTTLNHNCVNVRRCALDSKLLHDIITNCKIYNNIELVRATKFVYYLDLIKCNWVSKVGDSVLYPVIFITHTSTRNLDKVSVKTYKGVKVKKLNRCADHAIVINPFVKFKLTLPNKTSHAKVLVTFCKLRTDITQIEAPLSGNVLVYTFPNINKRIPGYIHVNIEGCIDGMIYINSSKFACVLKLHRSMYRIPPFPIDICSCCSQYTNGDIEIPIHDLIKDVAIFKNKETVYYLKLNNKTIARFTYFNNIDTAITQEHEYVKIALGIVCKLMINNMHSIVGVNHSNTFVNCLLEDNV

SEQ ID NO: 157 - protein, 574 aa, Vaccinia virus
MSRRLIYVLNINRESTHKIQENEIYTYFSHCNIDHTSTELDFVVKNYDLNRRHPVTGYTALHCYLYNNYFTNDVLKILLNHGVDVTMKTSSGRMPVYILLTRCCNISHDVVIDMIDKDKNHLLHRDYSNLLLEYIKSRYMLLKEEDIDENIVSTLLDKGIDPNFKQDGYTALHYYYLCLAHVYKPGECRKPITIKKAKRIISLFIQHGANLNALDNCGNTPFHLYLSIEMCNNIHMTKMLLTFNPNFKICNNHGLTPILCYITSDYIQHDILVMLIHHYETNVGEMPIDERRIIVFEFIKTYSTRPADSITYLMNRFKNINIYTRYEGKTLLHVACEYNNTQVIDYLIRINGDINALTDNNKHATQLIIDNKENSPYTINCLLYILRYIVDKNVIRSLVDQLPSLPIFDIKSFEKFISYCILLDDTFYDRHVKNRNSKTYRYAFSKYMSFDKYDGIITKCHDETMLLKLSTVLDTTLYAVLRCHNSRKLRRYLTELKKYNNDKSFKIYSNIMNERYLNVYYKDMYVSKVYDKLFPVFTDKNCLLTLLPSEIIYEILYMLTINDLYNISYPPTKV

SEQ ID NO: 158 - protein, 353 aa, Vaccinia virus
MTMKMMVHIYFVSLSLLLLLFHSYAIDIENEITEFFNKMRDTLPAKDSKWLNPACMFGGTMNDIAALGEPFSAKCPPIEDSLLSHRYKDYVVKWERLEKNRRRQVSNKRVKHGDLWIANYTSKFSNRRYLCTVTTKNGDCVQGIVRSHIKKPPSCIPKTYELGTHDKYGIDLYCGILYAKHYNNITWYKDNKEINIDDIKYSQTGKELIIHNPELEDSGRYDCYVHYDDVRIKNDIVVSRCKILTVIPSQDHRFKLILDPKINVTIGEPANITCTAVSTSLLIDDVLIEWENPSGWLIGFDFDVYSVLTSRGGITEATLYFENVTEEYIGNTYKCRGHNYYFEKTLTTTVVLE

SEQ ID NO: 159 - protein, 56 aa, Vaccinia virus; identical to SEQ ID NO: 133

SEQ ID NO: 160 - protein, 271 aa, Vaccinia virus
LKNVECVDIDSTITFMKYDPNDDNKRTCSNWVPLTNNYMEYCLVIYLETPICGGKIKLYHPTGNIKSDKDIMFAKTLDFKSTKVLTGRKTIAVLDISVSYNRSMTTIHYNDDVDIDIHTDKNGKELCYCYITIDDHYLVDVETIGVIVNRSGKCLLVNNHLGIGIVKDKRISDSFGDVCMDTIFDFSEARELFSLTNDDNRNIAWDTDKLDDDTDIWTPVTENDYKFLSRLVLYAKSQSDTVFDYYVLTGDTEPPTVFIFKVTRFYFNMPK

SEQ ID NO: 161 - protein, 74 aa, Vaccinia virus
MYCRCSHGYTGIRCQHVVLVDYQRSEKPNTTTSYIPSPGIMLVLVGIIIITCCLLSVYRFTRRTKLPLQDMVVP

SEQ ID NO: 162 - protein, 244 aa, Vaccinia virus; identical to SEQ ID NO: 150

SEQ ID NO: 163 - protein, 222 aa, Vaccinia virus
MNHCLLAISAVYFKAKWLTPFEKEFTSDYPFYVSPTEMVDVSMMSMYGKAFNHASVKESFGNFSIIELPYVGDTSMMVILPDKIDGLESIEQNLTDTNFKKWCDFMDAMFIDVHIPKFKVTGSYNLVDTLVKSGLTEVFGSTGDYSNMCNLDVSVDAMIHKTYIDVNEEYTEAAAATCALVSDCASTVTNEFCADHPFIYVIRHVDGKILFVGRYCSPTTNC

SEQ ID NO: 164 - protein, 149 aa, Vaccinia virus
MTANFSTHVFSPQHCGCDRLTSIDDVKQCLTEYIYWSSYAYRNRQCAGQLYSTLLSFRDDAELVFIDIRELVKHMPWDDVKDCAEIIRCYIPDEQKTIREISAIIGLCAYAATYWGGEDHPTSNSLNALFVMLEMLNYVDYNIIFRRMN

SEQ ID NO: 165 - protein, 326 aa, Vaccinia virus
MSILPVIFLSIFFYSSFVQTFNASECIDKGQYFASFMELENEPVILPCPQINTLSSGYNILDILWEKRGADNDRIIPIDNGSNMLILNPTQSDSGIYICITTNETYCDMMSLNLTIVSVSESNIDLISYPQIVNERSTGEMVCPNINAFIASNVNADIIWSGHRRLRNKRLKQRTPGIITIEDVRKNDAGYYTCVLEYIYGGKTYNVTRIVKLEVRDKIIPSTMQLPDGIVTSIGSNLTIACRVSLRPPTTDTDVFWISNGMYYEEDDGDGDGRISVANKIYMTDKRRVITSRLNINPVKEEDATTFTCMAFTIPSISKTVTVSIT

SEQ ID NO: 166 - protein, 340 aa, Vaccinia virus
MSRKFMQVYEYDREQYLDEFIEDRYNDSFITSPEYYSAEKYMCRYTTLNHNCVNVRRCALDSKLLHDIITNCKIYNNIELVRATKFVYYLDLIKCNWVSKVGDSVLYPVIFITHTSTRNLDKVSVKTYKGVKVKKLNRCADHAIVINPFVKFKLTLPNKTSHAKVLVTFCKLRTDITQIEAPLSGNVLVYTFPDINKRIPGYIHVNIEGCIDGMIYINSSKFACVLKLHRSMYRIPPFPIDICSCCSQYTNDDIEIPIHDLIKDVAIFKNKETVYYLKLNNKTIARFTYFNNIDTAITQEHEYVKIALGIVCKLMINNMHSIVGVNHSNTFVNCLLEDNV

SEQ ID NO: 167 - protein, 574 aa, Vaccinia virus
MSRRLIYVLNINRESTHKIQENEIYTYFSHCNIDHTSTELDFVVKNYDLNRRQPVTGYTALHCYLYNNYFTNDVLKILLNHGVDVTMKTSSGRMPVYILLTRCCNISHDVVIDMIDKDKNHLSHRDYSNLLLEYIKSRYMLLKEEDIDENIVSTLLDKGIDPNFKQDGYTALHYYYLCLAHVYKPGECRKPITIKKAKRIISLFIQHGANLNALDNCGNTPFHLYLSIEMCNNIHMTKMLLTFNPNFKICNNHGLTPILCYITSDYIQHDILVMLIHHYETNVGEMPIDERRIIVFEFIKTYSTRPADSITYLMNRFKNINIYTRYEGKTLLHVACEYNNTHVIDYLIRINGDINALTDNNKHAIQLIIDNKENSPYTIDCLLYILRYIVDKNVIRSLVDQLPSLPIFDIKSFEKFISYCILLDDTFYNRHVRNRNSKTYRYAFSKYMSFDKYDGIITKCHDETMLLKLSTVLDTTLYAVLRCHNSKKLRRYLNELKKYNNDKSFKIYSNIMNERYLNVYYKDMYVSKVYDKLFPVFTDKNCLLTLLPSEIIYEILYMLTINDLYNISYPPTKV

SEQ ID NO: 168 - protein, 265 aa, Vaccinia virus
MTMKMMVHIYFVSLSLLLLLFHSYAIDIENEITEFFNKMRDTLPAKDSKWLNPACMFGGTMNDIATLGEPFSAKCPPIEDSLLSHRYKDYVVKWERLEKNRRRQVSNKRVKHGDLWIANYTSKFSNRRYLCTVTTKNGDCVQGIVRSHIRKPPSCIPKTYELGTHDKYGIDLYCGILYAKHYNNITWYKDNKEINIDDIKYSQTGKKLIIHNPELEDSGRYDCYVHYDDVRIKNDIVVSRCKILTVIPSQDHRFKLKRNCGYASN

SEQ ID NO: 169 - protein, 91 aa, Vaccinia virus
MRQIKINGTDMLTVMYMLNKPTKKRYVNNPIFTDWANKQYKFYNQIIYNANKLIEQSKKIDDMIEEVSIDDNRLSTLPLEIRHLIFSYAFL

SEQ ID NO: 170 - protein, 55 aa, Vaccinia virus
MSSKGGSGGMWSVFIHGHDGSNKGSKTYTSGGGGMWGGGSSSGVNGGVKSGTGKI

SEQ ID NO: 171 - protein, 71 aa, Vaccinia virus
MFDYLENEEVALDELKQMLRDRDPNDTRNQFKNNALHAYLFNEHCNNVEVVKLLLDSGTNPLRKNWRQLPH

SEQ ID NO: 172 - protein, 83 aa, Vaccinia virus
MLKLKDIAMALLEATGFSNINDFNIFSYMKSKNVDVDLIKVLVEHGFDLSVKCENHRSVIENYVMTMILFIENGCSVLYEDEY

SEQ ID NO: 173 - protein, 170 aa, Vaccinia virus
MKGIDNTAYSYIDDLTCCTRGIMADYLNSDYRYNKDVDLVKLFLENGKPHGIMCSIVPLWRNDKETIFLILKTMNSDVLQHILIEYMTFGDIPLVEYGTVVNKEAIHGYFRNINIDSYTMKYLLKKEGRCHQLSRLDTYVNPTMDVIISTLIHTKRVFVTCLMLAQFLVL

SEQ ID NO: 174 - protein, 173 aa, Vaccinia virus
MPSIISIGHLCKSNYGCYNFYTYTYKKGLCDMSYACPILSTINICLPYLKDINMIDKRGETLLHKAVRYNKQSLVSLLLESGSDVNIRSNNGYTCIAIAINESKNIELLKMLLCHKPTLDYVIDSLREISNIVDNDYAIKQCIKYAMIIDDCTSSKIPEFISQRYNDYIDLCN

SEQ ID NO: 175 - protein, 90 aa, Vaccinia virus
MKKIMVGGNTMFSLIFTDHGAKIIHRYANNPELREYYELKQNKIYVEAYDIISNAIVKHDRIHKTIESVDDNTYISNLPYTIKYKIFEQQ

SEQ ID NO: 176 - protein, 126 aa, Vaccinia virus
MRILFLIAFMYGCVHSYVNAVETKCSNLDIVTSSGEFHCSGCVEHMPNFSYMYWLAKDMRSDEDAKFIEHLGEGIKEDETVRTIDGRIVTLQKVLHVTDTNKFAHYRFTCVLTTIDGVSKKNIWLK

SEQ ID NO: 177 - protein, 62 aa, Vaccinia virus
MKLFTQNDRYFGLLDSCNHIFCITCINIWHKTRRETGASDNCPICRTRFRNITMSKFYKLVN

SEQ ID NO: 178 - protein, 66 aa, Vaccinia virus
MHYPKYYINITKINPHLANQFRAWKKRIAGRDYMTNLSKDTGIQQSKLYVTVKKIETYMVYIYTTI

SEQ ID NO: 179 - protein, 331 aa, Vaccinia virus
MDIYDDKGLQTIKLFNNEFDCIRNDIRELFKHVTDSDSIQLPMEDNSDIIENIRKILYRRLKNVECVDIDNTITFMKYDPNDDNKRTCSNWVPLTNNYMEYCLVIYLETPICGGKIKLYHPTGNIKSDKDIMFAKTLDFKSKKVLTGRKTIAVLDISVSYNRSITTIHYNDDVDIDIHTDKNGKELCYCYITIDDHYLVDVETIGVIVNRSGKCLLVNNHLGIGIVKDKRISDSFGDVCMDTIFDFSEARELFSLTNDDNRNIAWDTDKLDDDTDIWTPVTENDYKFLSRLVLYAKSQSDTVFDYYVLTGDTEPPTVFIFKVTRFYFNMPK

SEQ ID NO: 180 - protein, 141 aa, Vaccinia virus
MLINYLMLLFAAMIIRSFADSGNAIETTLPEITNATTDIPAIRLCGPEGDGYCLHGDCIHARDIDGMYCRCSHGYTGIRCQHVVLVDYQRSEKPNTTTSYIPSPGIMLVLVGIIIITCCLLSVYRFTRRTNKLPLQDMVVP

SEQ ID NO: 181 - protein, 357 aa, Vaccinia virus
MDIFKELIVKHPDENVLISPVSILSTLSILNHGAAGSTAEQLSKYIENMNENTPDDKKDDNNDMDVDIPYCATLATANKIYGSDSIEFHASFLQKIKDDFQTVNFNNANQTKELINEWVKTMTNGKINSLLTSPLSINTRMTVVSAVHFKAMWKYPFSKHLTYTDKFYISKNIVTSVDMMVGTENNLQYVHINELFGGFSIIDIPYEGNSSMVIILPDDIEGIYNIEKNITDEKFKKWCGMLSTKSIDLYMPKFKVEMTEPYNLVPILENLGLTNIFGYYADFSKMCNETITVEKFLHTTFIDVNEEYTEASAVTGVFMTNFAMVYRTKVYINHPFMYMIKDTTGRILFIGKYCYPQ

SEQ ID NO: 182 - protein, 190 aa, Vaccinia virus
MMIYGLIACLIFVTSSIASPLYIPVIPPITEDKSFNSVEVLVSLFRDDQKDYTVTSQFNNYTIDTKDWTIGVLSTPDGLDIPLTNITYWSRFTIGRALFKSESEDIFQKKMSILGVSIECKKSSTLLTFLTVRKMTRVFNKFPDMAYYRGDCLKAVYVTMTYKNTKTGETDYTYLSNGGLPAYYRNGVDG

SEQ ID NO: 183 - protein, 51 aa, Vaccinia virus
MNLQKLSLAIYLTATCSWCYETCIRKTALYHDIQLEHVEDNKDSVASLPYK

SEQ ID NO: 184 - protein, 87 aa, Vaccinia virus
MSLESFIITTFNNNSSTNIDNMCHLYVKVCPSSLLFRLFVECCDINKLVEGTTPLHCYLMNEGFESSVLKNLLKEYVMTSITQIFNS

SEQ ID NO: 185 - protein, 181 aa, Vaccinia virus
MISLSFLIHNPLKKWKLKPSISINGYRSTFTMAFPCAQFRPCHCHATKDSLNTVADVRHCLTEYILWVSHRWTHRETAGPLYRLLISFRTDATELFGGELKDSLPWDNIDNCVEIIKCFIRNDSMKTAEELRAIIGLCTQSAIVSGRVFNDKYIDILLMLRKILNENDYLTLLDHIRTAKY

SEQ ID NO: 186 - protein, 382 aa, Vaccinia virus
MIAFIIFREIGIISTRIAMDCTCILCRLLDEDVTYKKIKLEIETCHNLSKHIDRRGNNALHCYVFNKCDTDIKIVRLLLSRGVERLCRNNEGLTPLGVYSKHRYVKSQIVHLLISSYSNSSNELKSNINDFDLSSDNIDLRLLKYLIVDKRIRPSKNTNYAINSLGLVDIYVTTPNPRPEVLLWLLKSECYSTGYVFRTCMYNSDMCKNSLHYYISSHRESQSLSKDVIKCLINNNVSIHGRDEGGSLPIQYYWSFSTIDIEIVKLLLIKDVDTCRVYDVSPILEAYYLNKRFRVTPYNVDMEIVNLLIERRHTLVDVMRSITSYDSREYNHYIIDNILKRFRQQDESIVQAMLINYLHYGDMVVRCMLDNGQQLSSARLLC

SEQ ID NO: 187 - protein, 198 aa, Vaccinia virus
MYGLILSRFNNCGYHCYETILIDVFDILSKYMDNIDMIDNENKTLLYYAVDVNNIQFAKRLLEYGASVTTSRSIINTAIQKSSYRRENKTKLVDLLLSYHPTLETMIDAFNRDIRYLYPEPLFACIRYALILDDDFPSKVKYDISGRHKELKRYRVDINRMKNAYISGVSMFDILFKRSKRHRLRYAKNPTSNGTKKN

SEQ ID NO: 188 - protein, 147 aa, Vaccinia virus
MSRINITKKIYCSVFLFLFLSYISNYEKVNDEMYEMGEMDEIVSIVRDSMWYIPNVFMDDGKNEGHVSVNNVCHMYFTFFDVDTSSHLFKLVIKHCDLNKRGNSPLHCYTMNTRFNPSVLKILLHHGMRNFDSKDDHYQSITRSLIY

SEQ ID NO: 189 - protein, 128 aa, Vaccinia virus
MEQTLTRLHTYLQQYTKHSPRVVYALLSRGYVIILIVHPSWNDCATGHILIMLLNWHEQKEEGQHLLYLFIKHNQGYTLNILRYLLDRFDIQKDEYYNTAFQNCNNNVASYIGYDINLPTKDGIRLGV

SEQ ID NO: 190 - protein, 111 aa, Vaccinia virus
MLPHTSDTTSTFRLKTVFDLVFENRNIIYKADVVNDIIHHRLKVPMIKSLFYKMSEFSPYDDYYVKKILAYCLLRDESFAELHSKFCLNEDYKSVFMKNISFDKIDSIIVT

SEQ ID NO: 191 - protein, 94 aa, Vaccinia virus
MHHPMESVKTTNTNAIICVREHTLPDYANTQCTPCGSGTFTSRNNHLPACLSCNGRRDRVTLLTIESVNALPDIIVFSKDHPDARHVFPKQNVE

SEQ ID NO: 192 - protein, 241 aa, Vaccinia virus
MHVPASLQQSSSSCTEEENKHHMGIDVIIKVTKQDQTPTNDKICQSVTEITESESDPDPEVESEDDSTSVEDVDLPTTYYSIIGGGLRMNFGFTKCPQIKSISESADGNTVNARLSSVSPGQGKDSPAITHEEALAMIKDCEVSIDIRCSEEEKDSDIKTHPVLGSNISHKKVSYEDIIGSTIVDTKCVKNLEFSVRIGDMCKESSELEVKDGFKYVDGSASEGATDDTSLIDSTKLKACV

SEQ ID NO: 193 - protein, 62 aa, Vaccinia virus; identical to SEQ ID NO: 177

SEQ ID NO: 194 - protein, 66 aa, Vaccinia virus; identical to SEQ ID NO: 178

SEQ ID NO: 195 - protein, 331 aa, Vaccinia virus; identical to SEQ ID NO: 179

SEQ ID NO: 196 - protein, 141 aa, Vaccinia virus; identical to SEQ ID NO: 180

SEQ ID NO: 197 - protein, 94 aa, Vaccinia virus; identical to SEQ ID NO: 191

SEQ ID NO: 198 - protein, 241 aa, Vaccinia virus; identical to SEQ ID NO: 192

SEQ ID NO: 199 - protein, 15 aa, Artificial Sequence
  Description of Artificial Sequence: Synthetic peptide
SVSESDTIRSISIAS

SEQ ID NO: 200 - protein, 149 aa, Vaccinia virus; identical to SEQ ID NO: 3

SEQ ID NO: 201 - protein, 326 aa, Vaccinia virus
MSILPVIFLPIFFYSSFVQTFNAPECIDKGQYFASFMELENEPVILPCPQINTLSSGYNILDILWEKRGADNDRIIPIDNGSNMLILNPTQSDSGIYICITTNETYCDMMSLNLTIVSVSESNIDLISYPQIVNERSTGEMVCPNINAFIASNVNADIIWSGHRRLRNKRLKQRTPGIITIEDVRKNDAGYYTCVLEYIYRGKTYNVTRIVKLEVRDKIIPSTMQLPDGIVTSIGSNLTIACRVSLRPPTTDADVFWISNGMYYEEDDGDGNGRISVANKIYMTDKRRVITSRLNINPVKEEDATTFTCMAFTIPSISKTVTVSIT

SEQ ID NO: 202 - protein, 340 aa, Vaccinia virus
MSRKFMQVYEYDREQYLDEFIEDRYNDSFITSPEYYSAEKYMCRYTTLNHNCINVRRCALDSKLLHDIITNCKIYNNIELVRATKFVYYLDLIKCNWVSKVGDSVLYPVIFITHTSTRNLDKVSVKTYKGVKVKKLNRCADHAIVINPFVKFKLTLPNKTSHAKVLVTFCKLRTDITQIEAPLSGNVLVYTFPDINKRIPGYIHVNIEGCIDGMIYINSSKFACVLKLHRSMYRIPPFPIDICSCCSQYTNDDIEIPIHDLIKDVAIFKNKETVYYLKLNNKTIARFTYFNNIDTAITQEHEYVKIALGIVCKLMINNMHSIVGVNHSNTFVNCLLEDNV

SEQ ID NO: 203 - protein, 167 aa, Vaccinia virus
MTKVIIILGFLIINTNSLSMKCEQGVSYYNSQELKCCKLCKPGTYSDHRCDKYSDTICGHCPSDTFTSIYNRSPWCHSCRGPCGTNRVEVTPCTPTTNRICHCDSNSYCLLKASDGNCVTCAPKTKCGRGYGKKGEDEMGNTICKKCRKGTYSDIVSDSDQCKPMTR

SEQ ID NO: 204 - protein, 237 aa, Vaccinia virus
MAMPSLSACSSIEDDFNYGSSVASASVHIRMAFLRKVYGILCLQFLLTTATTAVFLYFDCMRTFIQGSPVLILASMFGSIGLIFALTLHRHKHPLNLYLLCGFTLSESLTLASVVTFYDVHVVMQAFMLTTAAFLALTTYTLQSKRDFSKLGAGLFAALWILILSGLLGIFVQNETVKLVLSAFGALVFCGFIIYDTHSLIHKLSPEEYVLASINLYLDIINLFLHLLQLLEVSNKK

SEQ ID NO: 205 - protein, 147 aa, Vaccinia virus
MASPCAKFRPCHCHATKDSLNTVADVRHCLTEYILWVSHRWTHRESAGSLYRLLISFRTDATELFGGELKDSLPWDNCVEIIKCFIRNDSMKTAEELRAIIGLCTQSAIVSGRVFNDKYIDILLMLRKILNENDYLTLLDHIRTAKY

SEQ ID NO: 206 - protein, 128 aa, Vaccinia virus; identical to SEQ ID NO: 189

SEQ ID NO: 207 - protein, 64 aa, Vaccinia virus; identical to SEQ ID NO: 145

SEQ ID NO: 208 - protein, 258 aa, Vaccinia virus
MKQYIVLACMCLAAAAMPASLQQSSSSSSSCTEEENKHHMGIDVIIKVTKQDQTPTNDKICQSVTEITESESDPDPEVESEDDSTSVEDVDPPTTYYSIIGGGLRMNFGFTKCPQIKSISESADGNTVNARLSSVSPGQGKDSPAITHEEALAMIKDCEVSIDIRCSEEEKDSDIKTHPVLGSNISHKKVSYEDIIGSTIVDTKCVKNLEFSVRIGDMCKESSELEVKDGFKYVDGSASEGATDDTSLIDSTKLKACV

SEQ ID NO: 209 - protein, 15 aa, Artificial Sequence
  Description of Artificial Sequence: Synthetic peptide
LLANGRMPTVLQCVN

SEQ ID NO: 210 - DNA, 156904 bp, Artificial Sequence
  Description of Artificial Sequence: Synthetic polynucleotide
  misc_feature (18348)..(19490): remaining portion of the C2L gene
  misc_feature (19491)..(19849): remaining portion of the F3L gene
  misc_feature (153421)..(153469): sequence that replaces a portion of the B8R gene sequence
  misc_feature (153430)..(153463): loxP site
  misc_feature (153470)..(153619): remaining portion of the B8R gene
  misc_feature (153514)..(153528): potential transcription regulatory sequences of the B9R gene
  misc_feature (153638)..(153667): potential transcription regulatory sequences of the B9R gene
  misc_feature (156094)..(156489): remaining portion of the B14R gene
  misc_feature (156490)..(156904): remaining portion of the B29R (ITR) gene
tcagacacacgctttgagttttgttgaatcgatgagtgaagtatcatcggttgcaccttcagatgccgatccgtcgacatacttgaatccatccttgacctcaagttcagatgattccttgcacatgtctccgatacgaacgctaaactctagattcttgacacattttgtatcgacgatcgttgaaccgatgatatcttcgtaactcactttcttatgagagatgttagacccgagtactggatgggtcttgatgtcgctgtctttctcttcttcgctacatctgatgtcgatagacacctcacagtctttgatcatagccagagcttcttcacgagtgatcgcgggagagtccttaccttgtcctggggacacgctggacaatctagcattcactgtgtttccatcagcggattctgagatggatttaatctgaggacatttggtgaatccaaagttcattctcagacctccaccgatgatggagtaataagtggtaggaggatctacatcctcgactgatgtggaatcatcttctgattccacctcgggatctggatctgactcggactctgtaatttccgttacggattggcaaatcttatcattggtcggtgtttggtcttgctttgtgactttgataataacatcgattcccatatgatgtttgttttcttcttccgtacacgaggaggaggatgaggatgattgctgaagactggcaggcacatgcatgccaggacgatatattgtttcataattgctattgattgagtactgttctttatgattctacttccttaccatgcaataaattagaatatattttctacttttacgagaaattaattattgtatttattatttatgggtgaaaaacttactataaaaagcgggtgggtttggaattagtgatcagtttatgtatatcgcaactaccgggcatatggctatcgacatcgagaacattacccacatgataagagattgtatcagtttcgtagtcttgagtattggtattactatatagtatatagatgtcgacgctagatatacagtctccgaatgcggcatgataccgtcatcattctttgctttcgttaactgtttggaggaagaatctttgttattgcatttaatctcgaaattcagagtgcacacctttctcctgtaaagaatcctgaagtcgctaccttattaagaacggagaagtatccatcacgaaatacgggattacagtctttatgattcatagtaatagttagttccgacgttgagatggattcactgagaccggtagtggtcgtccgagtacacgacgtgtcgttgacgggatacagattaatttccacatcgatatagttaaaggtatttctgggtacgggttcgcatttatctgcggaagagacggtgtgagaatatgttccgagaccacacggagaacagatgacgtctccggatactccgtatcctattccacattttgtttgggaaacacatgccttgcatccggatgatcctttgagaagacaataatatccgggagagcattcacagattctattgtgagtagtgttacacgatcgcgtcttccgttacaacttagacaagcgggtaaatgattattgcgagatgtgaaggtacccgaaccacacggcgtacattgtgtgttagtcttgctatcgcataatctggaagcgtatgttcccggacacaaattatggcgtttgtattcgttgtctttacactttccatcggatggtgcatgcggtgctatatctcttccgtttattattatacatgagagaaacaatatatacgagtataatacggacttcataatttaataatgtagtaatcgttgtcgtgttcctgtttcctacttctccaatcatatagatattttctttctatcatggataatatttgtaatggttctttccgtacaacatactgtttagatgatattgcgcataatttccggaggcaaatacgatagtctagattgaccgatggtagactctaatttattgagtgctttgtcgacgagtttacttttacgctccatcgatagatggcactgttctatgagatcgtcgtacatgggaaatgaaatgtgtctgtccgaatgtatggcttcaagatagctgtgataccgtatacaggtcggtgtcggagattcgaatctctttgaggcgacttatgtcacgatgatggaatctatcttatcgaatgatatatttttcataaatacacttttatagtcctcgtttaaacagaatttactatgtagttccgcgaatgactcgtcccttaataggcagtaggctagtatcttttttacgtagtaatcgtcgtagggagagaattctgacatcttgtagaacaacgatttaatcataggtagagatactttcagtctgtggtggatgatgtcattcacaacatccgccttgtatatgatgtttctgttttcaaacaccaagtcgaataccgtctttagtcggaaggttgatgtcgtatccgatgtatgaggcaacattgttgttacaattttgaaaggcggtattatagtattcgtctttctgaatgtcgaacctatctagtagataccgtagtatattgagagtgtatccttgattatgttttatgaatagataaagtagatgttgtccttcttccttttgttcgtgccaattgagtaacattatgagaatatgacctgttgcacaatcgttccatgatgggtgtacaatcaagattattacgtatcctcgagataaaagagcatacaccacacgaggactatgtttggtatactgttgaaggtaagtgtgtaaccgcgttaatgtttgctccataatctattatcgcgtagatgaatcgcttctcggctcgcatcttagtgtgacttaacttgtaataattgcttttgtagaacgtggatatgtgtttacagtagtaatgaagagaagtgagttcatcctcgtcggcgcaattagggtcggatcctttgtacagaacgtagtagtttaagctcccattgaatttatatctaagataacacagcaatagatcggatgatttactaaagtcatcaatggtgtccgttagtatatcaaagatcttgttatcgattgatagtgaatgaatcagatagtggtgtcctttttcatccttgctatcaaagttacgcatgccgtggtgtaacaatatctttaatacagatggattaaatcgtgtattcatcgtatagcaatgtaatggagagttacctcgtttattcagatcgcagtgtttaataactagcttaaacagatgagacgatgtatccacatcaaagaacgtaaaatacatatgacaaacattgttgacagaaacgtgaccttcattcttaccgtcgtccataaatacgttaggtatgtaccacatactgtcgcgaacgatgctcacaatctcgtccatctcgcccatctcatacatttcatcatttactttttcataattagagatgtacgaaagaaaaagaaaaagaaaaagaaaaacagaacaatatatttttttagtaatgtttatgcgagacatataaaataaactccgtgtttatgatgccggtaaatgtttttatcatcttggacggaatcgattttgtaatatgtcatggaaacaaatgaaacaggacattatcactccatgataaattatttaatggagtaataaagtatctccatgggtaatttcgaaatcaagttatcgtctgtattaatgttgtccactatggagtcgatcctctcactgttctttacagtttctgtaatgatggacgttagttcttttttgtaccatttgatgtcggattctttgcgtatctcagtctgtggcgtttgcttcgtttaaataatatatcaaacatggagacgcctgatatgtaggcattcttcattctattaatgtctactctatagcgctttagttccttatgatgaccggcgatatcatacttactttagaaggaaaatcatcatctaggattaaggcgtatctgatacaggcgaataatggttcaggatatagatagcgtatatctctattaaatgcgtcaatcatagtctctagagtgggatggtagctaagtaataaatcaactatcctcgttttgttttctctttggtaactgcttttctggatggccgtattgattatcgagcgtgatgttgtaacactcgctccatattccaataaccgctttgcaaattgtatattattgacatcgaccgcgtaatatagtagagttttattctcattatcgatcatatctatatcatccatgtacttgcttagtatatcaaatacatctattagtatggtttcataacagtgatacccgcaattattaaatctcgataatatcagaccgtacatacatagacggccattgttagatatgtgatttacagccgcgtgtccatattttccacgataaaccttacgacgtttacatcgacgagattattattaacaaagtagtcgtgcagaggatagttgttgtccgttatctaacatgcatcgaacgaccatatcgccgtaatgtaagtagtttatcaacatggcttgtacgatggattcatcctgttgtctaaatctctttagaatgttatcgatgatgtagtggttatattctctggaatcgtacgaagtaatactacgcattacgtcgacaagagtatgacgtctctcaataagaagattaacgatttccatgtctacattatatggggttactctaaatcgcttgtttagataatacgcctctaatatagggctgacgtcgtatactctacacgtgtccacatcctttattaataataatttaacaatctctatatctatggttgagaaagaccagtagtattggatgggtaaagatcctccttcgtctctgccatggatggaaacattgttattgatcaaacatttaattacatccttggatagagattgagattctctatgagacgatatatagtaatgaagagagttcttacacatatcactgttgtacatacaggtacgaaatacgtaaccggtgctgtaacattctgatttaagaagccatagcaatacttctggtctcggattaggcgtcgttacgtatatatccaccaatccgagaccattgattgcataattcgtattcttggacggacgtatccgtttatccacaattaggtattttagcagacgtaagtcgatattatccgaagacagatcgaaatcatttatattcgacttgagttcgttagaggaattcgaatagctggatatcagtagatgcacaatctgagattttacgtatctatgcttactgtatgctcctagcggagttaatccttcgttgtttctacaaagtctctcgactccgcgagagagtaacagtcgaacaatcttaatgtctgtatcgcatttattggagacgtaacaatgtagcgcattgtttcctcgtctatctatatgttttgataagttgtgacacgtttcaatctctagttttatttttttgtacgtcacatcttcatccagtagacgacatagaatagtgcactctctaccacaataatccatagctattctggtgctaattattcctatttcacgaaaaatgatgaaggcaatcattcctcataagatgataaaaagtgtagtgagagagcatgaaggagatttagtatttagcagtgcggatatgatccaagagggtgagatagtcgttctcgttcagaatctttcgcagcataagtagtatgtcgatatacttatcgttgaagactcttccagagacgatagctgattgagtacaaagtccaatgattgcacgaagttcttcggcggttttcatggagtcatttctgatgaaacatttaatgatctccacgcaattgtcgatattgtcccacggaagtgaatccttcaactcaccaccaaagagctccgttgcatcagttctgaaagagatgagaagcctgtagagagaccctgcgctttctctatgggtccatctatgagaaacccacaggatgtattcagtcagacaatgtctgacgtcggccacggtattcagggagtccttagtagcgtggcaatgacagggtctgaactgggcacaaggaaaggccattgtaaaggtagacctgtagccgtttatgctaatagagggctttaatttccatttttttaatgggttgtggatgaggaatgagagtgatatcatattgagatacgtagttatgtagaggtgtatttcctatattatttactttcggtttcatattttaccaactctttaataaatttcttttcacgatgcatcttattgaatgacgttttctcataagtggacatatagatgcagaagtaatgaagaaaagtattacctctatcatctacataattagggtctgctcctttttttaacaacttatacagtacgtagtagtagtttatcggttttaaatcaagtctagaatatatagtggattaatatatttttatattagctaaagctatctatactatcagaaagcatatcattctcaacttcatcatgagttaaatatttgtgtaatggatgtcatgaacattaaacgtattcatgacatactcctttaataggttttttaaaacagatgattcaaatccttcattcattagataacagtgtaacggagtcgtaccttctactagtttgtttatatcacagcattctacaaacagtctaaacaatagagaagacggacagactttaacgtataaatgacacatgttatcgatattcgttgatgaattattattaaacgtagttatgataaatgattctaacgacatctctcgctagagataaaatctagtatcgtatcattaaacatctttgcatcatactcgcatagcatagtttttcataattaatacaatatttaaaagacttattcggaaagtattttaatacatgtatcatcgatggagatccatatgaggagtcacttgtagttcttcagtagtaataacagtgctatcatcgatagtataattatatgtagaaggttcatatgttgttgtaattggagtaactgttggtagttcttccgtggaatcaataattatactaacagcaatagtataattatataaatatgttccgttgatatcacatattttaatgaactcatttctaacaccctcagctatatctgtccaattaaatgtagccaacaatctactacgttctctttgattgactacttgtacggtagcgacgctacactatctttattgtcttctacatgctccaattgaatgtcatgatacaacgcagtttttcttatgcatgtttcataacaccacgaacatgtcgcagtaagatatatagccagagataatttctgtaaattcatgattgccggtcataaacaagcccgtcaataattgtggctatatattcagtttatagagcaaaataattaagcacaatagcgcttaatctcaaaatatgttatgtttatttttttcatattaaacatactggttaaaatcctctaaaggctgatcttcatctataaatcaagatcataattacatttagacagtggtttcatgtttataaaaatgttctttttgtgtgaataaggaatatactaatcaataatcaaccatcgaccccattacgatagtatgcaggcaaccccccattagagaggtacgtgtaatcagtctctccagttttagtatttttataagtcattgttacataaacggcttttaaacagtctcctcgataataagccatatctggaaatttattaaatactcgagtcattttacgcacggtcaaaaaagtaagtaatgtcgacgacttcttacattctatagaaacacctagaatactcattttcttttggaaaatatcctcagactctgatttgaacaatgcacgacctatagtaaaccgtgaccaataagttatattagtcaatggtatatccaaaccatcaggtgtggatagtccagtctttggtatcgatagtgtagttattgaactgagaagttaccgtatagtctttttggtcatctctaaacaaggaaactaatacctctacactattgaacgatttatcttccgtaatgggtggactagcgatggatgaagtcacgaatataagacacgctattaatccgtatatcatcattttgatattacttataataacgatttgtttaatttttagtttatactattaattgtaaatgatattattatttttttaagtattatcagctttagtttatactattactatttgtaatatttagacatagataaacgtgataaaagtctatttgtttatatttattgcggatagcagtatttccctataaaaagtatacgtcctgtggtgtctttaatcatgtacatgaatggatggtttatgtagaccttcgtacgatataccatcgaaaagttaatcgtaaatactcctgtaacggccgatgcttctgtatactcctcattaacatctataaacgtcgtatgtagaaatttttctacagtgatagtttcattacacatcttgctaaaatctgcataatatccgaatatattagtaagtcctaaattttctaaaatcggtaccagattatacggttctgtcatttccactttaaactttggcatatacaagtctatacttttagtagataacataccacaccattttttaaatttttcatctgttatatttttttctatgttatatataccttctatgtcgtccggtagtataatcaccatactagagtttccctcgtatggaatatcgataatagagaatcctccgaataattcattaatatgtacatattgcaagttattctcggtacccaccatcatatcaacactggtaactatattcttagaaatataaaacttgtctgtatatgtaagatgtttagaaaatggatatttccacattgctttaaaatggacggcgctaacaactgtcatacgagtattaatggatagcggactagtcaataaggaattaattttaccatttgtcattgtcttaacccattcgttgattagttcctttgtttggttagcattattaaagtttacagtttgaaaatcgtcttttattttttgtaggaaggaggcgtggaactcgatactatcgctaccgtatattttatttgcggtagctagtgtcgcacaatacggaatatctacgtccatgtcattattgtcatcgggtgtattctcattcatattctctatatattttgatagttgttcagctgtagaaccagctgctccatgatttagaatagataaagtagataaaatagaaactggagaaatcaaaacattttcatcagggtgttttacgattagttctttaaagatatccatggtatagaccaaacaataacgataacgatatatatcataaataaataatgttaaatttcagtttatgtttgtaccccgtattcatacttaacaaattggtattgcgtacacaatcaatcatattacataccattaataatgcaagcataaaaaatcgttagtagatgtttctaaatataggttccgtaagcaaagaatataagaatgaagcggtaatgataaaatcaatcgttatctaaaatgatcatactcatttattttattctattatattaacacatacatttttaacagcaacacattcaatattgtattgttatttttatattatttacacaattaacaatatattattagtttatattactgaattaataatataaaattcccaatcttgttataaacacacactgagaaacagcataaacacagaatccatcaaaaatgtcgatgaaatatctgatgttgttgttcgctgctatgataatcagatcattcgccgatagtggtaacgctatcgaaacgacattgccagaaattacaaacgctacaacagatattccagctatcagattatgcggtccagagggagatggatattgtttacacggtgactgtatccacgctagagatatcgacggtatgtattgtagatgctctcatggttatacaggcattagatgtcagcatgtagtattagtagactatcaacgttcagaaaacccaaacactacaacgtcatatatcccatctcccggtattatgcttgtattagtaggcattattattattattacgtgttgtctattatctgtttataggttcactcgaagaactaataaactacctctacaagatatggttgtgccataatttttataaattttttttatgagtatttttacaaaaatgtataaagtgtatgtcttatgtatatttataaaaatgctaaatatgcgatgtatctatgttatttgtatttatctaaacaatacctctacctctagatattatacaaaaattttttatttcagcatattaaagtaaaatctagttaccttgaaaatgaatacagtgggtggttccgtatcaccagtaagaacataatagtcgaatacagtatccgattgagattttgcatacaatactagtctagaaagaaatttgtaatcatcttctgtgacgggagtccatatatctgtatcatcgtctagtttatcagtgtcccatgctatattcctgttatcatcattagttaatgaaaataactctcgtgcttcagaaaagtcaaatattgtatccatacatacatctccaaaactatcgcttatacgtttatctttaacgatacctatacctagatggttatttactaacagacattttccagatctattgactataactcctatagtttccacatcaaccaagtaatgatcatctattgttatataacaataacataactcttttccgtttttatcagtatgtatatctatattaacgtcgtcgttgtagtgaatagtagttattgatctattatatgaaacggatatgtctagaacggcaattgttttacgtccagttaacactttctttgatttaaagtctagagtctttgcaaacataatatccttatccgactttatatttcctgtagggtggtataattttattttgcctccacatatcggtgtttccaaatatattactagacaatattccatatagttattagttaagggtacccaattagaacacgtacgcttattatcatcatttggatcgtatttcataaaagttattgtactatcgatgtcaacacattctacattttttaatcgtctatatagtatttttctgatattttctataatatcagaattgtcttccatcggaagttgtatactatcagaatcagttacatgtttaaataattctctgatgtcattccttatacaatcaaattcattattaaacagtttaatagtctgtagacctttatcgtcgtaaatatccattgtcttattagttacgcttatttttatgtgtttttacgttgctttattatattttataagaatgattgtttgacgaatcacgagaactattaagacatatattattagaggtatatattataaaaaagtttttgattacgatgttataagaggaaagaggacacattaacatcatacatcaattaactacattcttataacatcgtaatcaaaagaattgcaattttgatgtataacaactgtcaatgggttatggaattgtatattacatattatacggtatgttggtaacgacaaataccgatcggtaattgtctgccggtgtaatagaattatatatatctatctattacaccggctgagtacctacactattatatgattatagtttctatttttacagtaccttaactaaagtctctagtcacaagagcaatactaccaacctacactattatatgattatagtttctatttttataggaacgcgtacgagaaaatcaaatgtctaatttctaacggtagtgttgataaacgattatcgtcaatggatacctcctctatcatgtcgtctattttcttactttgttctattaacttattagcattatatattatttgattataaaacttatattgcttattagcccaatctgtaaatatcggattattaacatatcgtttctttgtaggtttatttaacatgtacatcactgtaagcatgtccgtaccatttattttaatttgacgcatatccgcaatttctttttcgcagtcggttataaattctatatatgatggatacatgctacatgtgtacttataatcgactaatatgaagtacttgatacatattttcagtaacgatttattattaccacctatgaataagtacctgtgatcgtctaggtaatcaactgttttcttaatacattcgatggttggtaatttactcagaataatttccaatatcttaatatataattctgctatttctggaatatatttatctgccagtataacacaaatagtaatacatgtaaacccatattttgttattatattaatgtctgcgccattatctattaaccattctactaggctgacactatgcgacttaatacaatgataaagtatactacatccatgtttatctattttgtttatatcatcaatatacggcttacaaagttttagtatcgataacacatccaactcacgcatagagaaggtagggaataatggcataatatttattaggttatcatcattgtcattatctacaactaagtttccattttttaaaatatactcgacaactttaggatctctattgccaaatttttgaaaatatttatttatatgcttaaatctatataatgtagctccttcatcaatcatacatttaataacattgatgtatactgtatgataagatacatattctaacaatagatcttgtatagaaactgtatatcttttaagaattgtggatattaggatattattacgtaaactattacacaattctaaaatataaaacgtatcacggtcgaataatagttgatcaactatataattatcgattttgtgatttttcttcctaaactgtttacgtaaatagttagatagaatattcattagttcatgaccactatagttactatcgaataacgcgtcaaatatttcccgtttaatatcgcatttgtcaagataataatagagtgtggtatgttcacgataagtataataacgcatctcttttttgtgtgaaattaaatagtttattacgtccaaagatgtagcataaccatcttgtgacctagtaataatataataatagagaactgttttacccattctatcatcataatcagtggtgtagtcgtaatcgtaatcgtctaattcatcatcccaattataatattcaccagcacgtctaatctgttctattttgatcttgtatccatactgtatgttgctacatgtaggtattcctttatccaataatagtttaaacacatctacattgggatttgatgttgtagcgtatttctctacaatattaataccatttttgatactatttatttctatacctttcgaaattagtaatttcaataagtctatatcgatgttatcagaacatagatattcgaatatatcaaaatcattgatatttttatagtcgactgacgacaataacaaaatcacaacatcgtttttgatattattatttttcttggtaacgtatgcctttaatggagtttcaccatcatactcatataatggatttgcaccactttctatcaatgattgtgcactgctggcatcgatgttaaatgttttacaactatcatagagtatcttatcgttaaccatgattggttgttgatgctatcgcattttttggtttctttcatttcagttatgtatggatttagcacgtttgggaagcatgagctcatatgatttcagtactgtagtgtcagtactattagtttcgatcagatcaatgtctagatctatagaatcaaaacacgataggtcagaagataatgaatatctgtacgcttctttttgtactgtaacttctcgttttgttagatgtttgcatcgtgctttaacatcaatggtacaaattttatcctcgctttgtgtatcatattcgtccctactataaaattgtatattcagattatcatgagatgtgtatacgctaacggtatcaataaacggagcacaccatttagtcataaccgtaatccaaaaatttttaaagtatatcttaacgaaagaagttgtatcatcgttaggatttggtaaatcattatctacagtgtatggtactagatcctcataagtgtatatatctagagtaatgtttaatttatcaaatggttgataatatggatcctcatgacaatttccgaagatggaaatgagatatagacatgcaataaatctaatcgaagacatggttactccttaaaaaaatacgaataatcaccttggctatttagtaagtgtcatttaacactatactcatattaatccatggactcataatctctatacgggattaacggatgttctatatacggggatgagtagttctcttctttaactttatactttttactaatcatatttagactgatgtatgggtaatagtgtttgaagagctcgttctcatcatcagaataaatcaatatctctgtttttttgttatacagatgtattacagcctcatatattacgtaatagaacgtgtcatctaccttattaactttcaccgcatagttgtttgcaaatacggttaatcctttgacctcgtcgatttccgaccaatctgggcgtataatgaatctaaactttaatttcttgtaatcattcgaaataatttttagtttgcatccgtagttatcccctttatgtaactgtaaatttctcaacgcgatatctccattaataatgatgtcgaattcgtgctgtatacccatactgaatggatgaacgaataccgacggcgttaatagtaatttactttttcatctttacatattgggtactagttttactatcataagtttataaattccacaagctactatggaataagccaaccatcttagtataacacacatgtcttaaagtttattaattaattacatgttgttttatatatcgctacgaatttaaacagagaaatcagtttaggaaaaaaaattatctatctacatcatcacgtctctgtattctacgatagagtgctactttaagatgagacatatccgtgtcatcaaaaatatactccattaaaatgattattccggcagcgaacttgatattggatatatcacaacctttgttaatatctacgacaatagacagcagtcccatggttccataaacagtgagtttatctttctttgaagagatattttgtagagatcttataaaactgtcgaatgacatcgcatttatatctttagctaaatcgtatatgttaccatcgtaatatctaaccgcgtctatcttaaacgtttccatcgctttaaagacgtttccgatagatggtctcatttcatcagtcatactgagccaacaaatataatcgtgtataacatctttgatagaatcagactctaaagaaaacgaatcggctttattatacgcattcatgataaacttaatgaaaaatgtttttcgttgtttaagttggatgaatagtatgtcttaataattgttattatttcattaattaatatttagtaacgagtacactctataaaaacgagaatgacataactagttatcaaagtgtctaggacgcgtaattttcatatggtatagatcctgtaagcattgtctgtattctggagctattttctctatcgcattagtgagttcagaatatgttataaatttaaatcgaataacgaacataactttagtaaagtcgtctatattaactcttttattttctagccatcgtaataccatgtttaagatagtatattctctagttactacgatctcatcgttgtctagaatatcacatactgaatctacatccaattttagaaattggtctgtgttacatatctcttctatattattgttgatgtattgtcgtagaaaactattacgtagaccattttctttataaaacgaatatatagtactccaattatctttaccgatatatttgcacacataatccattctctcaatcactacatctttaagattttcgttgttaagatatttggctaaactatataattctattagatcatcaacagaatcagtatatatttttctagatccaaagacgaactctttggcgtcctctataatattcccagaaaagatattttcgtgttttagtttatcgagatctgatctgttcatatacgccatgattgtacggtacgttatgataaccgcataaaataaaaatccattttcatttttaaccaatactattcataattgagattgatgtaatactttgttactttgaacgtaaagacagtacacggatccgtatctccaacaagcacgtagtaatcaaatttggtgttgttaaacttcgcaatattcatcaatttagatagaaacttatactcatcatctgttttaggaatccatgtattattaccactttccaacttatcattatcccaggctatgtttcgtccatcatcgttgcgcagagtgaataattcttttgtattcggtagttcaaatatatgatccatgcatagatcggcaaagctattgtagatgtgatttttcctaaatctaatataaaactcgtttactagcaaacactttcctgatttatcgaccaagacacatatggtttctaaatctatcaagtggtggggatccatagttatgacgcagtaacatatattattacattcttgactgtcgctaatatctaaatatttattgttatcgtattggattctgcatatagatggcttgtatgtcaaagatatagaacacataaccaatttatagtcgcgctttacattctcgaatctaaagttaagagatttagaaaacattatatcctcggatgatgttatcactgtttctggagtaggatatattaaagtctttacagatttcgtccgattcaaataaatcactaaataatatcccacattatcatctgttagagtagtatcattaaatctattatattttatgaaagatatatcactgctcacctctatatttcgtacatttttaaactgtttgtataatatctctctgatacaatcagatatatctattgtgtcggtagacgataccgttacatttgaattaatggtgttccattttacaacttttaacaagttgaccaattcatttctaatagtatcaaactctccatgattaaatattttaatagtatccattttatatcactacggacacaaagtagctgacataaaccattgtataatttttatgttttatgtttattagcgtacacattttggaagttccggcttccatgtatttcctggagagcaagtagatgatgaggaaccagatagtttatatccgtacttgcacttaaagtctacattgtcgttgtatgagtatgatcttttaaacccgctagacaagtatccgtttgatattgtaggatgtggacatttaacaatctgacacgtgggtggatcggaccattctcctcctgaacacaggacaccagagttaccaatcaacgaatatccactattgcaactataagttacaacgcttccatcggtataaaaatcctcgtatccgttatgtcttccgttggatatagatggaggggattggcatttaacagattcacaaataggtgcctcgggattccataccatagatccagtagatcctaattcacaatacgatttagattcaccgatcaaatgatatccgctattacaagagtacgttatactagagccaaagtctactccaccaatatcaagttggccattatcgatatctcgaggcgatgggcatctccgtttaatacattgattaaagagtgtccatccagtacctgtacatttagcatatataggtcccattttttgctttctgtatccaggtagacatagatattctatagtgtctcctatgttgtaattagcattagcatcagtctccacactattcttaaatttcatattaatgggtcgtgacggaatagtacagcatgatagaacgcatcctattcccaacaatgtcaggaacgtcacgctctccaccttcatatttatttatccgtaaaaatgttatcctggacatcgtacaaataataaaaagcccatatatgttcgctattgtagaaattgtttttcacagttgctcaaaaacgatggcagtgacttatgagttacgttacactttggagtctcatctttagtaaacatatcataatattcgatattacgagttgacatatcgaacaaattccaagtatttgattttggataatattcgtattttgcatctgctataattaagatataatcaccgcaagaacacacgaacatctttcctacatggttaaagtacatgtacaattctatccatttgtcttccttaactatatatttgtatagataattacgagtctcgtgagtaattccagtaattacatagatgtcgccgtcgtactctacagcataaactatactatgatgtctaggcatgggagacttttttatccaacgatttttagtgaaacattccacatcgtttaatactacatatttttcatacgtggtataaactccacccattacatatatatcatcgtttacgaataccgacgcgcctgaatatctaggagtaattaagtttggaagtcttatccatttcgaagtgccgtgtttcaaatattctgccacacccgttgaaatagaaaattctaatcctcctattacatataactttccatcgttaacacaagtactaacttctgattttaacgacgacatattagtaaccgttttccattttttcgtttcaagatctacccgcgatacggaataaacatgtctattgttaatcatgccgccaataatgtatagacaattatgtaaaacatttgcattatagaattgtctatctgtattaccgactatcgtccaatattctgttctaggagagtaatgggttattgtggatatataatcagagtttttaatgactactatattatgttttataccatttcgtgtcactggctttgtagatttggatatagttaatcccaacaatgatatagcattgcgcatagtattagtcataaacttgggatgtaaaatgttgatgatatctacatcgtttggatttttatgtatccactttaataatatcatagctgtaacatcctcatgatttacgttaacgtcttcgtgggataagatagttgtcagttcatcctttgataattttccaaattctggatcggatgtaaatctcgtaagataaagtttatacaagtgtagatgataaattctacagaggttaatatagaagcacgtaataaattgacgacgttatgactatctatatatacctttccagtatacgagtaaataactatagaagttaaactgtgaatgtcaaggtctagacaaacccttgtaactggatctttatttttcgtgtatttttgacgtaaatgtgtgcgaaagtaaggagataactttttcaatatcgtagaattgactattatattgccacctatagcatcaataattgttttgaatttcttagtcatagacaatgctaatatattcttacagtacacagtattgacaaatatcggcatttatgtttctttaaaagtcaacatctaaagaaaaatgattatcttcttgagacataactcccattttttggtattcacccacacgtttttcgaaaaaattagtttttccttccaatgatatattttccatgaaatcaaacggattggtaacattataaatttttttaaatcccaattcagaaatcaatctatccgcgacaaattctatatatgttttcatcatttcacaattcattcctataagtttaactggaagagccgcagtaagaaattcttgttcaatggatactgcatctgttataatagatctaacggtttcttcactcggtggatacaataaatgtttaaacatcaaacatgcgaagtcgcagtgcagaccctcgtctctactaattagttcgttggaaaacgtgagtccgggcattaggccacgctttttaagccaaaatatggaagcgaatgatccggaaaagaagattccttctactgcagcaaaggcaataagtctctctccataaccggcgctgtcatgtatccacttttgagcccaatcggccttcttttttacacaaggcattgtttctatggcattaaagagatagtttttttcattactatctttaacataagtatcgatcaaaagactatacatttccgaatgaatgttttcaatggccatctgaaatccgtagaaacatctagcctcggtaatctgtacttctgtacaaaatcgttccgccaaattttcattcactattccgtcactggctgcaaaaaacgccaatacatgttttataaaatatttttcgtctggtgttagtttattccaatcattgatatctttagatatatctacttcttccactgtccaaaatgatgcctctgcctttttatacatgttccagatgtcataatattggattgggaaaataacaaatctatttggatttggtgcaaggatgggttccataactaaattaacaatatcaataaattttttttcagttatctatatgcctgtacttggattttttgtacatcgatatcgccgcaatcactacaataattacaagtattattgatagcattgttattagtactatcataattaaattatcgacattcatgggtgctgaataatcgttattatcatcattatcattttgtaattgtgacatcatactagataaatcgtttgcgagattgttgtgggaagcgggcatggaggatgcattatcattattatttaacgccttccattcggattcacaaatatggcgcgcgttcaacattttatggaaactataattttgtgaaaacagataacaagaaaactcgtcatcgttcaaatttttaacgatagtaaaccgattaaacgtcgagctaatttctaacgctagcgactctgttggatatgggtttccagatatatatcttttcagttcccctacgtatctataatcatctgtaggaaatggaagatatttccatttatctactgttcctaatatcatatgtggtggtgtagtagaaccattaagcgcgaaagatgttatttcgcatcgtattttaacttcgcaataatttctggttagataacgcactctaccagtcaagtcaatgatattagcctttacagatatattcatagtagtcgtaacgatgactccatcttttagatgcgatactcctttgtatgtaccagaatcttcgtacctcaaactcgatatatttaaacaagttaatgagatattaacgcgttttatgaatgatgatatataaccagaagttttatcctcggtggctagcgctataaccttatcattataataccaactagtgtgattaatatgtgacacgtcagtgtgggtacaaatatgtacattatcgtctacgtcgtattcgatacatccgcatacagccaacaaatataaaatgacaaatactctaacgacgttcgtacccatcttgatgcggtttaataaatgttttgatttcaatttattgtaaaaaaagattcggttttatactgttcgatattctcattgcttatattttcatctatcatctccacacagtcaaatccgtggttagcatgcacctcatcaaccggtaaaagactatcggactcttctatcattataactctagaatatttaatttggtcattattaatcaagtcaattatcttatttttaacaaacgtgagtattttactcattttttataaaaacttttagaaatatacagactctatcgtgtgtctatatcttctttttatatccaatgtatttatgtctgatttttcttcatttatcatatataatggtccaaattctacacgtgcttcggattcatccagatcattaaggttcttataattgtaacatccttctcttccctcttctacatcttccttcttattcttattcttattcttattcttattcttattcttattcttattcttagcgtcacagaatctaccacagcagaatcccatgacgagcgtcatattaaactaattcattttcaattataatatacgattagtaatgaccattaaaataaaaaatattcttcataaccggcaagaaagtgaaaagttcacattgaaactatgtcagtagtatacatcatgaaatgatgatatatatatattctctattttggtggaggattatatgatataattcgtggataatcattcttaagacacatttcttcattcgtaaatcttttcacgttaaatgagtgtccatattttgcaatttcttcatatgatggcggtgtacgtggacgaggctgctcctgttcttgttgtggtcgccgactatcgtgtttgcgtttagatccctccattatcgcgattgcgtagatggagtactattttataccttgtaattaaatttttttattaattaaacgtataaaaacgttccgtatctgtatttaagagccagatttcgtctaatagaacaaatagctacagtaaaaataactagaataattgctacacccactagaaaccacggatcgtaatacggcaatcggttttcgataataggtggaacgtatattttatttaaggacttaacaattgtctgtaaaccacaatttgcttcagcggatcctgtattaactatctgtaaaagcatatgttgaccgggcggagccgaacattctccgatatctaatttctgtatatctataatattattaacctccgcatacgcattacagttcttttctagcttggataccgcactaggtacatcgtctagatctattcctatttcctcagcgatagctcttctatccttttccggaagcaatgaaatcacttcaataaatgattcaaccatgagtgtgaaactaagtctagaattactcatgcatttgttagttattcggagcgcgcaatttttaaactgtcctataacctctcctatatgaatagcacaagtgacattagtagggatagaatgttgagctaatttttgtaaataactatctataaaaagattatacaaagttttaaactctttagtttccgccatttatccagtctgagaaaatgtctctcataataaatttttccaagaaactaattgggtgaagaatggaaacctttaatctatatttatcacagtctgttttggtacacatgatgaattcttccaatgccgtactaaattcgatatctttttcgatttctggatatgtttttaataaagtatgaacaaagaaatggaaatcgtaataccagttatgtttaactttgaaattgttttttattttcttgttaatgattccagccacttgggaaaagtcaaagtcgtttaatgccgatttaatacgttcattaaaaacaaactttttatcctttagatgaattattattggttcattggaatcaaaaagtaagatattatcgggtttaagatctgcgtgtaaaaagttgtcgcagcatggtagttcgtagattttaatgtataacagagccatctgtaaaaagataaactttatgtattgtaccaaagatttaaatcctaatttgatagctaactcggtatctactttatctgccgaatacagtgctaggggaaaaattataatgtttcctctttcatattcgtagttagttctcttttcatgttcgaaaaagtgaaacatgcggttaaaatagtttataacattaatattactgttaataactgccgggtaaaagtgggatagtaatttcacgaatttgatactgtcctttctctcgttaaacgcctttagaaaaactttagaagaatatctcaatgagagttcctgaccatccatagtttgtatcaataatagcaacatatgaagaacacgtttatacagagtatgtaaaaatgttaatttatagtttaatcccatggcccacgcacacacgattaattttttttcatctccctttagattgttgtatagaaatttgggtactgtgaactccgccgtagtttccatgggactatataattttgtggcctcgaatacaaattttactacatagttatctatcttaaaaactataccatatcctcctgtagatatgtgataaaaatcgtcgtttataggataaaatcgtttatccttttgttggaaaaatgatgaattaatgtaatcattctcttctatctttagtagtgtttccctattaaaattcttaaaataatttaacaatctaactgacggagcccaattttggtgtaaatctaattgggacattatgttgttaaaatataaacagtctcctaatataacagtatctgataatctatggggagacatccattgatattcaggggatgaatcattggcaacacccatttattgtacaaaaagccccaatttacaaacgaaagtccaggtttgatagagacaaactattaactattttgtctctgtttttaacacctccacagtttttaatttctttggtaatgaaattattcacaatatcagtatcttctttatctaccagagattttactaacttgataaccttggctgtctcattcaatagggtagtaatatttgtatgtgtgatattgatatctttttgaattgtttcttttagaagtgattctttgatggtgtcagcatacgaattacaataatgcagaaactcggttaacatgcaggaattatagtaagccaattccaattgttgcctgtgttgtattagagtgtcaatatgagcaatggtgtccttgcgtttctctgatagaatgcgagcagcgattttggcgttatcatttgacgatatttctggaatgacgaatcctgtttctactaactttttggtaggacaaagtgaaacaatcaagaagatagcttctcctcctatttgtggaagaaattgaactcctctagatgatctactgacgatagtatctccttgacagatattggaccgaattacagaagtacctggaatgtaaagccctgaaaccccctcattttttaagcagattgttgccgtaaatcctgcactgtgaccaagatagagagctcctttggtgaatccatctctatgtttcagtttaaccaagaaacagtcagctggtctaaaatttccatctctatctaatacagcatctaacttgatgtcaggaactatgaccggtttaatgttatatgtaacattgagtaaatccttaagttcataatcatcactgtcatcagttatgtacgatccaaacaatgtttctaccggcatagtggatacgaagatgctatccatcagaatgtttccctgattagtattttctatatagctattcttctttaaacgattttccaaatcagtaactatgttcatttttttaggagtaggacgcctagccagtatggaagaggattttctagatcctctcttcaacatctttgatctcaatggaatgcaaaaccccatagtgaaacaaccaacgataaaaataatattgtttttcactttttataattttaccatctgactcatggattcattaatatctttataagagctactaacgtataattctttataactgaactgagatatatacaccggatctatggtttccataattgagtaaatgaatgctcggcaataactaatggcaaatgtatagaacaacgaaattatactagagttgttaaagttaatattttctatgagctgttccaataaattatttgttgtgactgcgttcaagtcataaatcatcttgatactatccagtaaaccgtttttaagttctggaatattattatcccattgtaaagcccctaattcgactatcgaatatcctgctctgatagcagtttcaatatcgacggacgtcaatactgtaataaaggtggtagtattgtcatcatcgtgataaactactggaatatggtcgttagtaggtacggtaactttacacaacgcgatatataactttccttttgtaccatttttaacgtagttgggacgtcctgcagggtattgttttgaagaaatgatatcgagaacagatttgatacgatatttgttggattcctgattatttactataatataatctagacagatagatgattcgataaatagagaaggtatatcgttggtaggataatacatccccattccagtattctcggatactctattaatgacactagttaagaacatgtcttctattctagaaaacgaaaacatcctacatggactcattaaaacttctaacgctcctgattgtgtctcgaatgcctcgtacaaggatttcaaggatgccatagattctttgaccaacgatttagaattgcgtttagcatctgatttttttattaaatcgaatggtcggctctctggtttgctaccccaatgataacaatagtcttgtaaagataaaccgcaagaaaatttatacgcatccatccaaataaccctagcaccatcggatgatattaatgtattattatagattttccatccacaattattgggccagtatactgttagcaacggtatatcgaatagattactcatgtaacctactagaatgatagttcgtgtactagtcataatatctttaatccaatctaagaaatttaaaattagattttttacactgttaaagttaacaaaggtattacccgggtacgtggatatcatatatggtattggtccattatcagtaatagctccataaactgatacggcgatggtttttatatgtgtttgatctaacgaggaagaaattcgcacccacaattcatctctagatatgtatttaatatcaaacggtaacacatcaatttcgggacgcgtatatgtttctaaatttttaatccaaatataatgatgacctatatgccctattatcatactgtcaactatagtacacctagagaacttacgatacatctgtttcctataatcgttaaattttacaaatctataacatgctaaaccttttgacgacaaccattcattaatttctgatatggaatctgtattctcgataccgtattgttctaaagccagtgctatatctccctgttcgtgggaacgctttcgtataatatcgatcaacggataatctgaagtttttggagaataatatgactcatgatctatttcgtccataaacaatctagacataggaattggaggcgatgatcttaattttgtgcaatgagtcgtcaatcctataacttctaatcttgtaatattcatcatcgacataatactatctatgttatcatcgtatattagtataccatgaccttcttcatttcgtgccaaaatgatatacagtcttaaatagttacgcaatatctcaatagtttcataattgttagctgttttcatcaagatttgtaccctgtttaacatgatggcgttctatacgtttctattttctattttttaaatttttaaatttttaacgatttactgtggctagatacccaatctctctcaaatatttttttagcctcgcttacaagctgtttatctatactattaaaactgacgaatccgtgattttggtaatgggttccgtcgaaatttgccgaagtgatatgaacatattcgtcgtcgactatcaacaattttgtattattctgaatagtgaaaaccttcacagatagatcattttgaacacacaacgcgtctagacttctggcggttgccatagaatatacgtcgttcttatcccaattaccaactagaagtctgatcttaactcctctattaatggctgcttctataatggagttgtaaatgtcgggccaatagtagctattaccgtcgacacgtgtagtgggaactatggccaaatgttcaatatctatactagtcttagctgacctgagtttatcaataactacatcggtatctagatctctagaatatcccaataggtgttccggagaatcagtaaagaacactccacctataggattcttaatatgatacgcagtgctaactggcagacaacaagccgcagagcataaattcaaccatgaattttttgcgctattaaaggctttaaaagtatcaaatcttctacgaagatctgtggccagcgggggataatcagaatatacacctaacgttttaatcgtatgtatagatcctccagtaaatgacgcgtttcctacataacatctttcatcatctgacacccaaaaacaaccgagtagtagtcccacattattttttttatctatattaacggttataaaatttatatccgggcagtgactttgtagctctcccagatttcttttccctcgttcatctagcaaaactattattttaatccctttttcagatgcctcttttagtttatcaaaaataagcgctcccctagtcgtactcagaggattacaacaaaaagatgctatgtatatatatttcttagctagagtgataatttcgttaaaacattcaaatgttgttaaatgatcggatctaaaatccatattttctggtagtgtttctaccagcctacattttgctcccgcaggtaccgatgcaaatggccacatttagttaacataaaaacttatacatcctgttctatcaacgattctagaatatcatcggctatatcgctaaaattttcatcaaagtcgacatcacaacctaactcagtcaatatattaagaagttccatgatgtcatcttcgtctatttctatatccgtatccattgtagattgttgaccgattatcgagtttaaatcattactaatactcaatccttcagaatacaatctgtatttcattgtaaatttataggcggtgtatttaagttggtagattttcaattatgtatcaatatagcaacagtagttcttgctcctccttgattctagcatcctcttcattattttcttctacgtacataaacatgtccaatacgttagacaacacaccgacgatggcggccgccacagacacgaatatgactagaccgatgaccatttaaaaacccctctctagctttcacttaaactgtatcgatcattcttttagcacatgtataatataaaaaaacattattctatttcgaatttaggcttccaaaaatttttcatccgtaaaccgataataatatatatagacttgttaatagtcggaataaatagattaatgcttaaactatcatcatctccacgattagagatacaatatttacattctttttgctgtttcgaaactttatcaatacacgttaatacaaacccaggaaggagatattgaaactgaggctgttgaaaatgaaacggtgaatacaataattcagataatgtaaaatcatgattccgtattctgatgatattagaactgctaatggatgtcgatggtatgtatctaggagtatctattttaacaaagcatcgatttgctaatatacaattatcattttgattaattgttattttattcatattcttaaaaggtttcatatttatcaattcttctacattaaaaatttccatttttaatttatgtagccccgcaatactcctcattacgtttcattttttgtctataatatccattttgttcatctcggtacatagattatccaattgagaagcgcatttagtagttttgtacattttaagtttattgacgaatcgtcgaaaactagttatagttaacattttattatttgataccctgatattaatacccctgccgttactattatttataactgatgtaacccacgtaacattggaattaactatcgatagtaatgcatcgacgcttccaaaattgtctattataaactcaccgataatttttttattacatgttttcatattcattaggattatcaaatctttaatcttactacgattgtatgcgttgatattacaagacgtcattctaaaagacggaggatttccatcaaatgccagacaatcacgtacaaagtacatggaaataggttttgttctattgcgcatcatagattcatatagaacacccgtagaaatactaatttgttttactctataaaatactaatgcatctatttcatcgttttgtataacgtctttccaagtgtcaaattccaaatttttttcattgatagtaccaaattcttctatctctttaactacttgcatagataggtaattacagtgatgcctacatgccgttttttgaaactgaatagatgcgtctagaagcgatgctacgctagtcacaatcaccactttcatatttagaatatatgtatgtaaaaatatagtagaatttcattttgtttttttctatgctataaatgaattctcattttgcatctgctcatactccgttttatatcaataccaaagaaggaagatatctggttctaaaagccgttaaagtatgcgatgttagaactgtagaatgcgaaggaagtaaagcttcctgcgtactcaaagtagataaaccctcatcacccgcgtgtgagagaagaccttcgtccccgtccagatgcgagagaatgaataaccctggaaaacaagtcccgtttatgaggacggacatgctacaaaatatgttcgcggctaatcgcgataatgtagcttctagacttttgaactaaaatacaattatatctttttcgatattaataaatccgtgtcgtccaggttttttatctctttcagtatgtgaatagataggtattttatctctattcatcatcgaatttaagagatccgataaacattgtttgtattctccagatgtcagcatctgatacaacaatatatgtgcacataaacctctggcacttatttcatgtaccttccccttatcactaaggagaatagtatttgagaaatatgtatacatgatattatcatgaattagatatacagaatttgtaacactctcgaaatcacacgatgtgtcggcgttaagatctaatatatcactcgataacacattttcatctagatacactagacattttttaaagctaaaatagtctttagtagtgacagtaactatgcgattattttcatcgatgatacatttcatcggcatattattacgcttaccatcaaagactataccatgtgtatatctaacgtattctagcatagttgccatacgtgcattaaacttttcaggatctttggatagatcttccaatctatctatttgagaaaacatttttatcatgttcaatagttgaaacgtcggatccactatatagatattatctataaagattttaggaactacgttcatggtatcctggcgaatattaaaactatcaatgatatgattatcgttttcatcttttatcaccatatagtttctaagatatgggattttacttaatataatattatttcccgtaataaattttattagaaatgccaaatctataagaaaagtcctcgaattagtttgaagaatatctatatcgccgtaccgtatatttggattaattagatatagagaatatgatccgtaacatatacaacttttattatggcgtctaagatattcttccatcaacttattaacatttttgactagggaagatacattatgacgtcccattacttttgccttgtctattattgcgacgttcatagaatttagcatatctcttgccaattcttccattgatgttacattataagaaattttagatgaaattacatttggagctttaatagtaagaactcctaatatgtccgtgtatgtggtcactaatacagattgtagttctataatcgtaaataatttacctatattatatgtttgagtctgtttagaaaagtagctaagtatacgatcttttatttctgatgcagatgtatcaacatcggaaaaaaatctttttttattcttttttactaaagatacaaatatgtctttgttaaaaacagttattttttgaatatttctagcttgtaattttaacatatgatattcattcacactaggtactctgcctaaataggtttctataatctttaatgtaatattaggaaaagtattctgatcaggattcctattcattttgaggatttaaaactctgattattgtctaatatggtctctacgcaaactttttcacagagcgatagagtttttgataactcgtttttcttaagaaatataaaactactgtctccagagctcgctctatcttttattttatttaattcgatacaaactcctgatactggttcagaaagtaattcattaattttcagtcctttatagaagatatttaatatagataatacaaaatcttcagtttttgatatcgatctgattgatcctagaactagatatattaataacgtgctcattaggcagtttatggcagcttgataattagatatagtatattccagttcatatttattagataccgcattgcccagattttgatattctatgaattcctctgaaaataaatccaaaataactaaacattctattttttgtggattagtgtactctcttccctctatcatgttcactactggtgtccacgatgataaatatctagagggaatataatatagtccataggatgccaatctagcaatgtcgaataactgtaatttgattcttcgttcttcattatgaattgattcttgaggtataaacctaacacaaattatattattagacttttcgtatgtaatgtctttcatgttataagtttttaatcctggaatagaatctattttaatgaggcttttaaacgcagagttctccaacgagtcaaagcataatactctgttgtttttcttatatacgatgttacgattttcttctttgaatggaataggtttttgaattagtttataattacaacataatagataaggaagtgtgcaaatagtacgcggaaaaaacataatagctcccctgttttcatccatggttttaagtaaatgatcactggcttctttagttaatggatattcgaacattaaccgtttcatcatcattggacagaatccatatttcttaatgtaaagagtgatcaaatcattgtgtttattgtaccatcttgttgtaaatgtgtattcggttatcggatctgctcctttttctattaaagtatcgatgtcgatctcgtctaagaattcaactatatcgacatatttcatttgtatacacataaccattactaacgtagaatgtataggaagagatgtaacgggaacagggtttgttgattcgcaaactattctaatacataattcttctgttaatacgtcttgcacgtaatctattatagatgccaagatatctatataattattttgtaagatgatgttaactatgtgatctatataagtagtgtaataattcatgtatttcgatatatgttccaactctgtctttgtgatgtctagtttcgtaatatctatagcatcctcaaaaaatatattcgcatatattcccaagtcttcagttctatcttctaaaaaatcttcaacgtatggaatataataatctattttacctcttctgatatcattaatgatatagtttttgacactatcttctgtcaattgattcttattcactatatctaagaaacggatagcgtccctaggacgaactactgccattaatatctctattatagcttctggacataattcatctattataccagaattaatgggaactattccgtatctatctaacatagttttaagaaagtcagaatctaagacctgatgttcatatattggttcatacatgaaatgatctctattgatgatagtgactatttcattctctgaaaattggtaactcattctatatatgctttccttgttgatgaaggatagaatatactcaatagaatttgtaccaacaaactgttctcttatgaatcgtatatcatcatctgaaataatcatgtaaggcatacatttaacaattagagacttgtctcctgttatcaatatactattcttgtgataatttatgtgtgaggcaaatttgtccacgttctttaattttgttatagtagatatcaaatccaatggagctacagttcttggcttaaacagatatagtttttctggaacaaattctacaacattattataaaggactttgggtagataagtgggatgaaatcctattttaattaatgctatcgcattgtcctcgtgcaaatatccaaacgcttttgtgatagtatggcattcattgtctagaaacgctctacgaatatctgtgacagatatcatctttagagaatatactagtcgcgttaatagtactacaatttgtattttttaatctatctcaataaaaaaattaatatgtatgattcaatgtataactaaactactaactgttattgataactagaatcagaatctaatgatgacgtaaccaagaagtttatctactgccaatttagctgcattatttttagcatctcgtttagattttccatctgccttatcgaatactcttccgtcgatgtctacacaggcataaaatgtaggagagttactaggcccaactgattcaatacgaaaagaccaatctctcttagttatttggcagtactcattaataatggtgacagggttagcatctttccaatcaataatttttttagccggaataacatcatcaaaagacttatgatcctctctcattgatttttcgcgggatacatcatctattatgacgtcagccatagcatcagcatccggcttatccgcctccgttgtcataaaccaacgaggaggaatatcgtcggagctgtacaccatagcactacgttgaagatcgtacagagctttattaacttctcgcttctccatattaagttgtctagttagttgtgcagcagtagctccttcgattccaatgtttttaatagccgcacacacaatctctgcgtcagaacgctcgtcaatatagatcttagacatttttagagagaactaacacaaccagcaataaaactgaacctactttatcatttttttattcatcatcctctggtggttcgtcgtttctatcgaatgtagctctgattaacccgtcatctataggtgatgctggttctggagattctggaggagatggattattatctggaagaatctctgttatttccttgttttcatgtatcgattgcgttgtaacattaagattgcgaaatgctctaaatttgggaggcttaaagtgttgtttgcaatctctacacgcgtgtctaactagtggaggttcgtcagctgctctagtttgaatcatcatcggcgtagtattcctacttttacagttaggacacggtgtattgtatttctcgtcgagaacgttaaaataatcgttgtaactcacatcctttattttatctatattgtattctactcctttcttaatgcattttataccgaataagagatagcgaaggaattctttttcggtgccgctagtacccttaatcatatcacatagtgttttatattccaaatttgtggcaatagacggtttatttctatacgatagtttgtttctggaatcctttgagtattctataccaatattattctttgattcgaatttagtttcttcgatattagattttgtattacctatattcttgatgtagtactttgatgatttttccatggcccattctattaagtcttccaagttggcatcatccacatattgtgatagtaattctcggatatcagtagcggctaccgccattgatgtttgttcattggatgagtaactactaatgtatacattttccatttataacacttatgtattaactttgttcatttatattttttcattattatgttgatattaacaaaagtgaatatatatgttaataattgtattgtggttatacggctacaatttcataatgagtggaagtcagtgtccgatgatcaatgacgatagctttactctgaaaagaaagtatcaaatcgatagtgcggagtcaacaatgaaaatggataagaagaggacaaagtttcagaatagagccaaaatggtaaaagaaataaatcagacaataagagcagcacaaactcattacgagacattgaaactaggatacataaaatttaagagaatgattaggactactactctagaagatatagcaccatctattccaaataatcagaaaacttataaactattctcggacatttcagccatcggcaaagcatcacagaatccgagtaagatggtatatgctctgctgctttacatgtttcccaatttgtttggagatgatcatagattcattcgttatagaatgcatccaatgagtaaaatcaaacacaagatcttctctcctttcaaacttaatcttattagaatattagtggaagaaagattctataataatgaatgcagatctaataaatggagaataattggaacacaagttgataaaatgttgatagctgaatctgataaatatacaatagatgcaaggtataacctaaaacccatgtatagaatcaagggaaaatctgaagaagataccctcttcatcaaacagatggtagaacaatgtgtgacatcccaggaattggtggaaaaagtgttgaagatactgtttagagatttgttcaagagtggagaatacaaagcgtacagatacgatgatgatgtagaaaatggatttattggattggatacactaaaattaaacattgttcatgatatagttgaaccatgtatgcctgttcgtaggccagtggctaagatactgtgtaaagaaatggtaaataaatactttgagaatccgctacatattattggtaaaaatcttcaagagtgcattgactttgttagtgaataggcatttcatctttctccaatactaattcaaattgttaaattaataatggatagtataaatagttattagtgataaaatagtaaaaataattattagaataagagtgtagtatcatagataactctcttctataaaaatggattttattcgtagaaagtatcttatatacacagtagaaaataatatagattttttaaaggatgatacattaagtaaagtaaacaattttaccctcaatcatgtactagctctcaagtatctagttagcaattttcctcaacacgttattactaaggatgtattagctaataccaatttttttgttttcatacatatggtacgatgttgtaaagtgtacgaagcggttttacgacacgcatttgatgcacccacgttgtacgttaaagcattgactaagaattatttatcgtttagtaacgcaatacaatcgtacaaggaaaccgtgcataaactaacacaagatgaaaaatttttagaggttgccgaatacatggacgaattaggagaacttataggcgtaaattatgacttagttcttaatccattatttcacggaggggaacccatcaaagatatggaaatcatttttttaaaactgtttaagaaaacagacttcaaagttgttaaaaaattaagtgttataagattacttatttgggcttacctaagcaagaaagatacaggcatagagtttgcggataatgatagacaagatatatacactctatttcaacaaactggtagaatcgtccatagcaatctaacagaaacgtttagagattatatctttcccggagataagactagctattgggtgtggttaaacgaaagtatagctaatgatgcggatattgttcttaatagacacgccattaccatgtatgataaaattcttagttatatatactctgagataaaacaaggacgcgttaataaaaacatgcttaagttagtttatatctttgagcctgaaaaagatatcagagaacttctgctagaaatcatatatgatattcctggagatatcctatctattattgatgcaaaaaacgacgattggaaaaaatattttattagtttttataaagctaattttattaacggtaatacatttattagtgatagaacgtttaacgaggacttattcagagttgttgttcaaatagatcccgaatatttcgataatgaacgaattatgtctttattctctacgagtgctgcggacattaaacgatttgatgagttagatattaataacagttatatatctaatataatttatgaggtgaacgatatcacattagatacaatggatgatatgaagaagtgtcaaatctttaacgaggatacgtcgtattatgttaaggaatacaatacatacctgtttttgcacgagtcggatcccatggtcatagagaacggaatactaaagaaactgtcatctataaaatccaagagtaaacggctgaacttgtttagcaaaaacattttaaaatattatttagacggacaattggctcgtctaggtcttgtgttagatgattataaaggagacttgttagttaaaatgataaaccatcttaagtctgtggaggatgtatccgcattcgttcgattttctacagataaaaaccctagtattcttccatcgctaatcaaaactattttagctagttataatatttccatcatcgtcttatttcaaaggtttttgagagataatctatatcatgtagaagaattcttggataaaagcatccatctaaccaagacggataagaaatatatacttcaattgataagacacggtagatcatagaacagaccaaatatattattaataatttggtatatacatagatattaattatcacatattaaaaattcacacatttttgataaatgggaactgctgcaacaattcagactcccaccaaattaatgaataaagaaaatgcagaaatgattttggaaaaaattgttgatcatatagttatgtatattagtgacgaatcaagtgattcagaaaataatcctgaatatattgattttcgtaacagatacgaagactatagatctctcattataaaaagtgatcacgagtttgtaaagctatgtaaaaatcatgcagagaaaagttctccagaaacgcaacaaatgattatcaaacacatatacgaacaatatcttattccagtatctgaagtactattaaaacctataatgtccatgggtgacataattacatataacggatgtaaagacaatgaatggatgctagaacaactctctaccctaaactttaacaatctccgcacatggaactcatgtagcataggcaatgtaacgcgtctgttttatacattttttagttatctgatgaaagataaactaaatatataagtataatcccattctaatactttaacctgatgtattagcatcttattagaatattaacctaactaaaagacataacataaaaactcattacatagttgataaaaagcggtaggatataaatattatggctgccaccgttccgcgttttgacgacgtgtacaaaaatgcacaaagaagaattctagatcaagaaacattttttagtagaggtctaagtagaccgttaatgaaaaacacatatctatttgataattacgcgtatggatggataccagaaactgcaatttggagtagtagatacgcaaacttagatgcaagtgactattatcccatttcgttgggattacttaaaaagttcgagtttctcatgtctctatataaaggtcctattccagtatacgaagaaaaagtaaatactgaattcatagccaatggatcgttctctggtagatacgtatcatatcttcgaaagttttctgctcttccaacaaacgagtttattagttttttattattgacctccatccctatctataatatcttattctggtttaaaaacacacagtttgatattactaaacacacattattcagatacgtctatacagataatgccaaacacctggcgttggctaggtatatgcatcaaacaggagactataagcctttgtttagtcgtctcaaagagaattatatatttaccggtcccgttccaatatgtatcaaagatatagatcaccctaatcttagtagagcaagaagtccatccgattatgagacattagctaatattagtactatattgtactttaccaagtatgatccggtattaatgtttttattgttttacgtacctgggtattcaattactacaaaaattactccagccgtagaatatctaatggataaactgaatctaacaaagagcgacgtacaactgttgtaaattattttatgcttcgtaaaatgtaggttttgaaccaaacattctttcaaagaatgagatgcataaaactttattatccaatagattgactatttcggacgtcaatcgtttaaagtaaacttcgtaaaatattctttgatcactgccgagtttaaaacttctatcgataattgtctcatatgttttaatatttacaagttttttggtccatggtacattagccggacaaatatatgcaaaataatatcgttctccaagttctatagtttctggattatttttattatattcagtaaccaaatacatattagggttatctgcggatttataatttgagtgatgcattcgactcaacataaataattctagaggagacgatctactatcaaattcggatcgtaaatctgtttctaaagaacggagaatatctatacatacctgattagaattcatccgtccttcagacaacatctcagacagtctggtcttgtatgtcttaatcatattcttatgaaacttggaaacatctcttctagtttcactagtacctttattaattctctcaggtacagattttgaattcgacgatgctgagtatttcatcgttgtatatttcttcttcgattgcataatcagattcttatataccgcctcaaactctattttaaaattattaaacaatactctattattaatcagtcgttctaactctttcgctatttctatagacttatcgacatcttgactgtctatctctgtaaacacggagtcggtatctccatacacgctacgaaaacgaaatctgtaatctataggcaacgatgttttcacaatcggattaatatctctatcgtccatataaaatggattacttaatggattggcaaaccgtaacataccgttagataactctgctccatttagtaccgattctagatacaagatcattctacgtcctatggatgtgcaactcttagccgaagcgtatgagtatagagcactatttctaaatcccatcagaccatatactgagttggctactatcttgtacgtatattgcatggaatcatagatggccttttcagttgaactggtagcctgttttaacatctttttatatctggctctctctgccaaaaatgttcttaatagtctaggaatggttccttctatcgatctatcgaaaattgctatttcagagatgaggttcggtagtctaggttcacaatgaaccgtaatatatctaggaggtggatatttctgaagcaatagctgattatttatttcttcttccaatctattggtactaacaacgacaccgactaatgtttccggagatagatttccaaagatacacacattaggatacagactgttataatcaaagattaatacattattactaaacattttttgttttggagcaaataccttaccgccttcataaggaaacttttgttttgtttctgatctaactaagatagttttagtttccaacaatagctttaacagtggacccttgatgactgtactcgctctatattcgaataccatggattgaggaagcacatatgttgacgcacccgcgtctgtttttgtttctactccataatactcccacaaatactgacacaaacaagcatcatgaatacagtatctagccatatctaaagctatgtttagattataatccttatacatctgagctaaatcaacgtcatcctttccgaaagataatttatatgtatcattaggtaaagtaggacataatagtacgactttaaatccattttcccaaatatctttacgaattactttacatataatatcctcatcaacagtcacataattacctgtggttaaaacctttgcaaatgcagcggctttgcctttcgcgtctgtagtatcgtcaccgataaacgtcatttctctaactcctctatttaatactttacccatgcaactgaacgcgttcttggatatagaatccaatttgtacgaatccaatttttcagatttttgaatgaatgaatatagatcgaaaaatatagttccattattgttattaacgtgaaacgtagtattggccatgccgcctactcccttatgactagactgatttctctcataaatacagagatgtacagcttcctttttgtccggagatctaaagataatcttctctcctgttaataactctagacgattagtaatatatctcagatcaaagttatgtccgttaaaggtaacgacgtagtcgaacgttagttccaacaattgtttagctattcgtaacaaaactatttcagaacatagaactagttctcgttcgtaatccatttccattagtgactgtatcctcaaacatcctctatcgacggcttcttgtatttcctgttccgttaacatctcttcattaatgagcgtaaacaataatcgtttaccacttaaatcgatataacagtaacttgtatgcgagattgggttaataaatacagaaggaaacttcttatcgaagtgacactctatatctagaaataagtacgatcttgggatatcgaatctaggtatttttttagcgaaacagttacgtggatcgtcacaatgataacatccattgttaatctttgtcaaatattgctcgtccaacgagtaacatccgtctggagatatcccgttagaaatataaaaccaactaatattgagaaattcatccatggtggcattttgtatgctgcgtttctttggctcttctatcaaccacatatctgcgacggagcattttctatctttaatatctagattataacttattgtctcgtcaatgtctatagttctcatctttcccaacggcctcgcattaaatggaggaggagacaatgactgatatatttcgtccgtcactacgtaataaaagtaatgaggaaatcgtataaatacggtctcaccatttcgacatctggatttcagatataaaaatctgttttcaccgtgactttcaaaccaattaatgcaccgaacatccatttatagaatttagaaatatattttcatttaaatgaatcccaaacattggggaagagccgtatggaccattatttttatagtactttcgcaagcgggtttagacggcaacatagaagcgtgtaaacgaaaactatatactatagttagcactcttccatgtcctgcatgtagacggcacgcgactattgctatagaggacaataatgtcatgtctagcgatgatctgaattatatttattattttttcatcagattatttaacaatttggcatctgatcccaaatacgcaatcgatgtgtcaaaggttaaacctttataaacttaacccattataaaacttatgattagtcacgactgaaataaccgcgtgattattttttggtataattctacacggcatggtttctgtgactatgaattcaacccccgttacattagtgaaatctttaacaaacagcaagggttcgtcaaagacataaaactcattgtttacaatcgaaatagaccccctatcacacttaaaataaaaaatatccttatcctttaccaccaaataaaattctgattggtcaatgtgaatgtattcacttaacagttccacaaatttatttattaactccgaggcacatacatcgtcggtattttttatggcaaactttactcttccagcatccgtttctaaaaaaatattaacgagttccatttatatcatccaatattattgaaatgacgttgatggacagatgatacaaataagaaggtacggtacctttgtccaccatctcctccaattcatgctctattttgtcattaactttaatgtatgaaaacagtacgccacatgcttccatgacagtgtgtaacactttggatacaaaatgtttgacattagtataattgtttaagactgtcaatctataatagatagtagctataatatattctatgatggtattgaagaagatgacaatcttggcatattgatcatttaacacagacatggtatcaacagatagcttgaatgaaagagaatcagtaattggaataagcgtcttctcgatggagtgtccgtataccaacatgtctgatattttgatgtattccattaaattatttagttttttctttttattctcgttaaacagcatttctgtcaacggaccccaacatcgttgaccgattaagttttgattgatttttccgtgtaaggcgtatctagtcagatcgtatagcctatccaataatccatcatctgtgcgtagatcacatcgtacactttttaattctctatagaagagcgacagacatctggaacaattacagacagcaatttctttattctctacagatgtaagatacttgaagacattcctatgatgatgcagaattttggataacacggtattgatggtatctgttaccataattcctttgatggctgatagtgtcagagcacaagatttccaatctttgacaatttttagcaccattatctttgttttgatatctatatcagacagcatggtgcgtctgacaacacagggattaagacggaaagatgaaatgattctctcaacatcttcaatggataccttgctattttttctggcattatctatatgtgcgagaatatcctctagagaatcagtatcctttttgatgatagtggatctcaatgacatgggacgtctaaaccttcttattctatcaccagattgcatggtgatttgtcttctttcttttatcataatgtaatctctaaattcatcggcaaattgtctatatctaaaatcataatatgagatgtttacctctacaaatatctgttcgtccaatgttagagtatctacatcagttttgtattccaaattaaacatggcaacggatttaattttatattcctctattaagtcctcgtcgataataacagaatgtagataatcatttaatccatcgtacatggttggaagatgcttgttgacaaaatctttaattgtcttgatgaaggtgggactatatctaacatcttgattaataaaatttataacattgtccataggatactttgtaactagttttatacacatctcttcatcggtaagtttagacagaatatcgtgaacaggtggtatattatattcatcagatatacgaagaacaatgtccaaatctatattgtttaatatattatatagatgtagtgtagctcctacaggaatatctttaactaagtcaatgatttcatcaaccgttagatctattttaaagttaatcatataggcattgatttttaaaaggtatgtagccttgactacattctcattaattaaccattccaagtcactgtgtgtaagaagattatattctatcataagcttgactacatttggtcccgataccattaaagaattcttatgatataaggaaacagcttttaggtactcatctactctacaagaattttggagagccttaacgatatcagtgacgtttattatttcaggaggaaaaaacctaacattgagaatgtcggagttaatagcttccagatacagtgattttggcaatagtccgtgtaatccataatccagtaacacgagctggtgcttgctagacaccttttcaatgtttaatttttttgaaataagctttgataaagccttcctcgcaaattccggatacatgaacatgtcggcgacatgattaagtattgttttttcattatttttatattttctcaacaagttctcaataccccaatagatgatagaatatcacccaatgcgtccatgttgtctatttccaacaggtcgctatatccaccaatagaagttttcccaaaaaagattctaggaacagttctaccaccagtaatttgttcaaaataatcccgcaattcattttcgggtttaaattctttaatatcgacaatttcatacgctcctcttttgaaactaaacttatttagaatatccagtgcatttctacaaaaaggacatgtatacttgacaaaaattgtcactttgttattggccaacctttgttgtacaaattcctcggccattttaatatttaagtgatataaaactatctcgacttatttaactctttagtcgagatatatggacgcagatagctatatgatagccaactacagaaggcaaacgctataaaaaacataattacgacgagcatatttataaatatttttattcagcattacttgatatagtaatattaggcacagtcaaacattcaaccactctcgatacattaactctctcattttctttaacaaattctgcaatatcttcgtaaaaagattcttgaaactttttagaatatctatcgactctagatgaaatagcgttcgtcaacatactatgttttgtatacataaaggcgcccattttaacagtttctagtgacaaaatgctagcgatcctaggatcctttagaatcacatagattgacgattcgtctctcttagtaactctagtaaaataatcatacaatctagtacgcgaaataatattatccttgacttgaggagatctaaacaatctagttttgagaacatcgataagttcatcgggaatgacatacatactatctttaatagaactcttttcatccagttgaatggattcgtccttaaccaactgattaatgagatcttctattttatcattttccagatgatatgtatgtccattaaagttaaattgtgtagcgcttctttttagtctagcagccaatactttaacatcactaatatcgatatacaaaggagatgatttatctatggtattaagaattcgtttttcgacatccgtcaaaaccaattcctttttgcctgtatcatccagttttccatcctttgtaaagaaattattttctactagactattaataagactgataaggattcctccataattgcacaatccaaactttttcacaaaactagactttacgagatctacaggaatgcgtacttcaggtttcttagcttgtgattttttcttttgcggacattttcttgtgaccaactcatctaccatttcattgattttagcagtgaaataagctttcaatgcacgggcactgatactattgaaaacgagttgatcttcaaattccgccatttaagttcaccaaacaacttttaaatacaaatatatcaatagtagtagaataagaactataaaaaaaataataattaaccaataccaaccccaacaaccggtattattagttgatgtgactgttttctcatcacttagaacagatttaacaatttctataaagtctgtcaaatcatcttccggagaccccataaatacaccaaatatagcggcgtacaacttatccatttatacattgaatattggcttttctttatcgctatcttcatcatattcatcatcaatatcaacaagtcccagattacgagccagatcttcttctacattttcagtcattgatacacgttcactatctccagagagtccgataacgttagccaccacttctctatcaatgattagtttcttgagtgcgaatgtaatttttgtttccgttccggatctatagaagacgataggtgtgataattgccttggccaattgtctttctcttttactgagtgattctagttcaccttctatagatctgagaatggatgattctccagccgaaacatattctaccatggctccgtttaatttgttgatgaagatggattcatccttaaatgttttctctgtaatagtttccaccgaaagactatgcaaagaatttggaatgcgttccttgtgcttaatgtttccatagacggcttctagaagttgatacaacataggactagccgcggtaacttttatttttagaaagtatccatcgcttctatcttgtttagatttatttttataaagtttagtctctccttccaacataataaaagtggaagtcatttgactagataaactatcagtaagttttatagagatagacgaacaattagcgtattgagaagcatttagtgtaacgtattcgatacattttgcattagatttactaatcgattttgcatactctataacacccgcacaagtctgtagagaatcgctagatgcagtaggtcttggtgaagtttcaactctcttcttgattaccttactcatgattaaacctaaataattgtactttgtaatataatgatatatattttcactttatctcatttgagaataaaaatgtttttgtttaaccactgcatgatgtacagatttcggaatcgcaaaccaccagtggttttattttatccttgtccaatgtgaattgaatgggagcggatgcgggtttcgtacgtagatagtacattcccgtttttagaccgagactccatccgtaaaaatgcatactcgttagtttggaataactcggatctgctatatggatattcatagattgactttgatcgatgaaggctcccctgtctgcagccatttttatgatcgtcttttgtggaatttcccaaatagttttataaactcgcttaatatcttctggaaggtttgtattctgaatggatccaccatctgccataatcctattcttgatctcatcattccataattttctctcggttaaaactctaaggagatgcggattaactacttgaaattctccagacaatactctccgagtgtaaatattactggtatacggttccaccgactcattatttcccaaaatttgagcagttgatgcagtcggcataggtgccaccaataaactatttctaagaccgtatgttctgattttatcttttagaggttcccaattccaaagatccgacggtacaacattccaaagatcatattgtagaataccgttactggcgtacgatcctacatatgtatcgtatggtccttccttctcagctagttcacaactcgcctctaatgcaccgtaataaatggtttcgaagatcttcttatttagatcttgtgcttccaggctatcaaatggataatttaagagaataaacgcgtccgctaatccttgaacaccaataccgataggtctatgtctcttattagagatttcagcttctggaataggataataattaatatctataattttattgagatttctgacaattactttgaccacatccttcagtttgagaaaatcaaatcgcccatctattacaaacatgttcaaggcaacagatgccagattacaaacggctacctcattagcatccgcatattgtattatctcagtgcaaagattactacacttgatagttcctaaattttgttgattactctttttgttacacgcatccttataaagaatgaatggagtaccagtttcaatctgagattctataatcgctttccagacgactcgagcctttattatagatttgtatctcctttctctttcgtatagtgtatacaatcgttcgaactcgtctccccaaacattgtccaatccaggacattcatccggacacatcaacgaccactctccgtcatccttcactcgtttcataaagagatcaggaatccaaagagctataaatagatctctggttctatgttcctcgtttcctgtattctttttaagatcgaggaacgccataatatcagaatgccacggttccaagtatatggccataactccaggccgtttgtttcctccctgatctatgtatctagcggtgttattataaactctcaacattggaataataccgtttgatataccattggtaccggagatatagcttccactggcacgaatattactaattgatagacctattccccctgccattttagagattaatgcgcatcgttttaacgtgtcatagataccctctatgctatcatcgatcatgttaagtaaaaaacagctagacatttggtgacgactagttcccgcattaaataaggtaggagaagcgtgcgtaaaccatttttcagaaagtagattgtacgtctcaatagctgagtctatatcccattgatgaattcctactgcgacacgcattaacatgtgctgaggtctttcaacgatcttgttgtttattttcaacaagtaggatttttccaaagttttaaaaccaaaatagttgtatgaaaagtctcgttcgtaaataataaccgagttgagtttatccttatatttgttaactatatccatggtgatacttgaaataatcggagaatgtttcccatttttaggattaacatagttgaataaatcctccatcacttcactaaatagtttttttgtttccttgtgtagatttgatacggctattctggcggctagaatggcataatccggatgttgtgtagtacaagtggctgctatttcggctgccagagtgtccaattctaccgttgttactccattatatattccttgaataaccttcatagctattttaataggatctatatgatccgtgtttaagccataacataattttctaatacgagacgtgattttatcaaacatgacattttccttgtatccatttcgtttaatgacaaacatttttgttggtgtaataaaaaaattatttaacttttcattaatagggatttgacgtatgtagcgtacaaaattatcgttcctggtatatagataaagagtcctatatatttgaaaatcgttacggctcgattaaactttaatgattgcatagtgaatatatcattaggatttaactccttgactatcatggcggcgccagaaattaccatcaaaagcattaatacagttatgccgatcgcagttagaacggttatagcatccaccatttatatctaaaaattagatcaaagaatatgtgacaaagtcctagttgtatactgagaattgacgaaacaatgtttcttacatatttttttcttattagtaactgacttaatagtaggaactggaaagctagacttgattattctataagtatagatacccttccagataatgttctctttgataaaagttccagaaaatgtagaattttttaaaaagttatcttttgctattaccaagattgtgtttagacgcttattattaatatgagtaatgaaatccacaccgcctctagatatcgcctttatttccacattagatggtaaatccaatagtgaaactatctttttaggaatgtatggactcgcgtttagaggagtgaacgtcttgggcgtcggaaaggatgattcgtcaaacgaataaacaatttcacaaatggatgttaatgtattagtaggaaatttcttgacgctagtggagttgaagattctaatggatgatgttctacctatttcatccgataacatgttaatttccgacaccaacggttttaatatttcgatgatatacggtagtctctctttcggacttatatagcttattccacaatacgagtcattatatactccaaaaaacaaaataactagtataaaatctgtatcgaatgggaaaaacgaaattatcgacataggtatagaatccggaacattgaacgtattaatacttaattctttttctgtggtaagtaccgataggttattgacattgtatggttttaaatattctataacttgagacttgatagatattagtgatgaattgaaaattatttttatcaccacgtgtgtttcaggatcatcgtcgacgcccgtcaaccaaccgaatggagtaaaataaatatcattaatatatgctctagatattagtatttttatcaatcctttgattatcatcttctcgtaggcgaatgattccatgatcaagagtgatttaagaacatcctccggagtattaatgggcttagtaaacagtccatcgttgcaataataaaagttatccaagttaaaggatattatgcattcgtttaaagatatcacctcatctgacggagacaattttttggtaggttttagagactttgaagctacttgtttaacaaagttattcatcgtcgtctactattctatttaattttgtagttaatttatcacatatcacattaattgactttttggtccatttttccatacgtttatattcttttaatcctgcgttatccgtttccgttatatccagtgatagatcgtgcaggttaaatagaatgctcttaaataatgtcatttttttatccgctaaaaatttaaagaatgtataaacctttttcagagatttgaaactcttaggtggtgtcctagtacacaatatcataaacaaactaataaacattccacattcagattccaacagctgattaacttccacattaatacagcctattttcgctccaaatgtacattcgaaaaatctgaataaaacatcgatgtcacaatttgtattatccaatacagaatgtctgtgattcgtgttaaaaccatcggagaaggaatagaaataaaaattattatagtggtggaattcagttggaatattgcctccggagtcataaaaggatactaaacattgttttttatcataaattacacatttccaatgagacaaataacaaaatccaaacattacaaatctagaggtagaacttttaattttgtctttaagtatatacgataagatatgtttattcataaacgcgtcaaatttttcatgaatcgctaaggagtttaagaatctcatgtcaaattgtcctatataatccacttcggatccataagcaaactgagagactaagttcttaatacttcgattgctcatccaggctcctctctcaggctctattttcatcttgacgacctttggattttcaccagtatgtattcctttacgtgataaatcatcgattttcaaatccatttgtgagaagtctatcgccttagatactttttcccgtagtcgaggtttaaaaaaatacgctaacggtatactagtaggtaactcaaagacatcatatatagaatggtaacgcgtctttaactcgtcggttaactctttcttttgatcgagttcgtcgctactattgggtctgctcaggtgccccgactctactagttccaacatcataccgataggaatacaagacactttgccggcggttgtagatttatcatatttctccactacatatccgttacaatttgttaaaaatttagatacatctatattgctacataatccagctagtgaatatatatgacataataaattggtaaatcctagttctggtattttactaattactaaatctgtatatctttccatttatcatggaaaagaatttaccagatatcttcttttttccaaactgcgttaatgtattctcttacaaatattcacaagatgaattcagtaatatgagtaaaacggaacgtgatagtttctcattggccgtgtttccagttataaaacatagatggcataacgcacacgttgtaaaacataaaggaatatacaaagttagtacagaagcacgtggaaaaaaagtatctcctccatcactaggaaaacccgcacacataaacctaaccacgaaacaatatatatacagtgaacacacaataagctttgaatgttatagttttctaaaatgtataacaaatacagaaatcaattcgttcgatgagtatatattaagaggactattagaagctggtaatagtttacagatattttccaattccgtaggtaaacgaacagatactataggtgtactagggaataagtatccatttagcaaaattccattggcctcattaactcctaaagcacaacgagagatattttcagcgtggatttctcatagacctgtagttttaactggaggaactggagtgggtaagacgtcacaggtacccaagttattgctttggtttaattatttatttggtggattctctactctagataaaatcactgactttcacgaaagaccagtcattctatctcttcctaggatagctttagttagattgcatagcaataccattttaaaatcattgggatttaaggtactagatggatctcctatttctttacggtacggatctataccggaagaattaataaacaaacaaccaaaaaaatatggaattgtattttctacccataagttatctctaacaaaactatttagttatggcactcttattatagacgaagttcatgagcatgatcaaataggagatattattatagcagtagcgagaaagcatcatacgaaaatagattctatgtttttaatgactgccacgttagaggatgacagggaacggctaaaagtatttttacctaatcccgcatttatacatattcctggagatacactgtttaaaattagcgaggtatttattcataataagataaatccatcttccagaatggcatacatagaagaagaaaagagaaatttagttactgctatacagatgtatactcctcctgatggatcatccggtatagtctttgtggcatccgttgcacagtgtcacgaatataaatcatatttagaaaaaagattaccgtatgatatgtatattattcatggtaaggtcttagatatagacgaaatattagaaaaagtgtattcatcacctaatgtatcgataattatttctactccttatttggaatccagcgttactatacgcaatgttacacacatttatgatatgggtagagtttttgtccccgctccttttggaggatcgcaagaatttatttctaaatctatgagagatcaacgaaaaggaagagtaggaagagttaatcctgggacatacgtatatttctatgatctgtcttatatgaagtctatacagcgaatagattcagaatttctacataattatatattgtacgctaataagtttaatctaacactccccgaagatttgtttataatccctacaaatttggatattctatggcgtacaaaggaatatatagactcgttcgatattagtacagaaacatggaataaattattatccaattattatatgaagatgatagagtatgctaaactttatgtactaagtcctattctcgctgaggagttggataactttgagaggacgggagaattaactagtattgtacgagaagccattttatctctaaatttacgaattaagattttaaattttaaacataaagatgatgatacgtatatacacttttgtaaaatattattcggtgtctataacggaacaaacgctactatatattatcatagacctctaacgggatatatgaatatgatttcagatactatatttgttcctgtagataataactaaaaatcaaactctaatgaccacatctttttttagagatgaaaaattttccacatctccttttgtagacacgactaaacattttgcagaaaaaagtttattagtgtttagataatcgtatacttcatcagtgtagatagtaaatgtgaacagataaaaggtattcttgctcaatagattggtaaattccatagaatatattaatcctttcttcttgagatcccacatcatttcaaccagagacgttttatccaatgatttacctcgtactataccacatacaaaactagattttgcagtgacgtcgtacctggtattcctaccaaacaaaattttacttttagttcttttagaaaattctaaggtagaatctctatttgccaatatgtcatctatggaattaccactagcaaaaaatgatagaaatatatattgatacatcgcagctggttttgatctactatactttaaaaacgaatcagattccataattgcctgtatatcatcagctgaaaaactatgttttacacgtattccttcggcatttctttttaatgatatatcttgtttagacaatgataaagttatcatgtccatgagagacgcgtctccgtatcgtataaatatttcattagatgttagacgcttcattaggggtatacttctataaggtttcttaatcagtccatcattggttgcgtcaagaactactatcggatgttgttgggtatctctagtgttacacatggccttactaaagtttgggtaaataactatgatatctctattaattatagatgcatatatttcattcgtcaaggatattagtatcgacttgctatcgtcattaatacgtgtaatgtaatcatataaatcatgcgatagccaaggaaaattcaaatagatgttcatcatataatcgtcgctataattcatattaatactttgacattgactaatttgtaatatagcctcgccacgaagaaagctctcgtattcagtttcatcgataaaggataccgttaaatataactggttgccgatagtctcatagtctattaagtggtaagtttcgtacaaatacagaatccctaaaatattatctaatgttggattaatctttaccataactgtataaaatggagacggagtcataactattttaccgtttgtacttactggaatagatgaaggaataatctccggacatgctggtaaagacccaaatgtctgtttgaagaaatccaatgttccaggtcctaatctcttaacaaaaattacgatattcgatcccgatatcctttgcattctatttaccagcatatcacgaactatattaagattatctatcatgtctattctcccaccgttatataaatcgcctccgctaagaaacgttagtatatccatacaatggaatacttcatttctaaaatagtattcgttttctaattctttaatgtgaaatcgtatactagaaagggaaaaattatctttgagttttccgttagaaaagaaccacgaaactaatgttctgattgcgtccgattccgttgctgaattaatggatttacaccaaaaactcatataacttctagatgtagaagcattcgctaaaaaattagtagaatcaaaggatataagtagatgttccaacaagtgagcaattcccaagatttcatctatatcattctcgaatccgaaattagaaattcccaagtagatatcctttttcatccgatcattgatgaaaatacgaactttattcggtaagacaatcatttactaaggagtaaaataggaagtaatgttcgtatgtcgttatcatcgtataaattaaaggtgtgttttttaccattaagtgacattataattttaccaatattggaattataatataggtgtatttgcgcactcgcgacggttgatgcatcggtaaatatagctgtatctaatgttctagtcggtatttcatcatttcgctgtctaataatagcgttttctctatctgtttccattacagctgcctgaagtttattggtcggataatatgtaaaataataagaaatacatacgaataacaaaaataaaataagatataataaagatgccatttagagatctaattttgttcaacttgtccaaattcctacttacagaagatgaggaatcgttggagatagtgtcttccttatgtagaggatttgaaatatcttatgatgacttgataacttactttccagataggaaataccataaatatatttctaaagtatttgaacatgtagatttatcggaggaattaagtatggaattccatgatacaactttgcgagatttagtttatcttagattgtacaagtattccaagtgtatacggccgtgttataaattaggagataatctaaaaggcatagttgttataaaggacaggaatatttatattagggaagcaaatgatgacttgatagaatatctcctcaaggaatacactcctcagatttatacatattctaatgagcgcgtccccataactggttcaaaattaattctttgtggattttctcaagttacatttatggcgtatacaacgtcgcatataacaacaaataaaaaggtagatgttctcgtttccaaaaaatgtatagatgaactagtcgatccaataaattatcaaatacttcaaaatttatttgataaaggaagcggaacaataaacaaaatactcaggaagatattttattcggtaacaggtggccaaactccataggtagctttttctatttcggattttagaatttccaaattcaccagcgatttatcggttttggtgaaatccaaggatttattaatgtccacaaatgccatttgttttgtctgtggattgtatttgaaaatggaaacgatgtagttagatagatgcgctgcgaagtttcctattagggttccgcgcttcacgtcacccagcatacttgaatcaccatcctttaaaaaaaatgataagatatcaacatggagtatatcatactcggattttaattcttctactgcatcactgacattttcacaaatactacaatacggtttaccgaaaataatcagtacgttcttcatttatgggtatcaaaaacttaaaatcgttactgctggaaaataaatcactgacgatattagatgataatttatacaaagtatacaatggaatatttgtggatacaatgagtatttatatagccgtcgccaattgtgtcagaaacttagaagagttaactacggtattcataaaatacgtaaacggatgggtaaaaaagggagggcatgtaaccctttttatcgatagaggaagtataaaaattaaacaagacgttagagacaagagacgtaaatattctaaattaaccaaggacagaaaaatgctagaattagaaaagtgtacatccgaaatacaaaatgttaccggatttatggaagaagaaataaaggcagaaatgcaattaaaaatcgataaactcacatttcaaatatatttatctgattctgataacataaaaatatcattgaatgagatactaacacatttcaacaataatgagaatgttacattattttattgtgatgaacgagacgcagaattcgttatgtgtctcgaggctaaaacacatttctctaccacaggagaatggccgttgataataagtaccgatcaggatactatgctatttgcatctactgataatcatcctaagatgataaaaaacttaactcaactgtttaaatttgttccctcggcagaggataactatttagcaaaattaacggcgttagtgaatggatgtgatttctttcctggactctatggggcatctataacacccaacaacttaaacaaaatacaattgtttagtgattttacaatcgataatatagtcactagtttggcaattaaaaattattatagaaagactaactctaccgtagacgtgcgtaatattgttacgtttataaacgattacgctaatttagacgatgtctactcgtatgttcctccttgtcaatgcactgttcaagaatttatattttccgcattagatgaaaaatggaacaattttaaatcatcttatttagagaccgttccgttaccctgtcaattaatgtacgcgttagaaccacgcaaggagattgatgtttcagaagttaaaactttatcatcttatatagatttcgaaaatactaaatcagatatcgatgttataaaatctatatcctcgatcttcggatattctaacgaaaactgtaacacgatagtattcggcatctataaggataatttactactgagtataaataattcattttactttaacgatagtctgttaataaccaatactaaaagtgataatataataaatataggttactagattaaaaatggtgttccaactcgtgtgctctacatgcggtaaagatatttctcacgaacgatataaattgattatacgaaaaaaatcattaaaggatgtactcgtcagtgtaaagaacgaatgttgtaggttaaaattatctacacaaatagaacctcaacgtaacttaacagtgcaacctctattggatataaactaatatggatccggttaattttatcaagacatatgcgcctagaggttctattatttttattaattataccatgtcattaacaagtcatttgaatccatcgatagaaaaacatgtgggtatttattatggtacgttattatcggaacacttggtagttgaatctacctatagaaaaggagttcgaatagtcccattggatagtttttttgaaggatatcttagtgcaaaagtatacatgttagagaatattcaagttatgaaaatagcagctgatacgtcattaactttattgggtattccgtatggatttggtcataatagaatgtattgttttaaattggtagctgactgttataaaaatgccggtgttgaaacatcgtctaaacgaatattaggtaaagatatttttctgagccaaaacttcacagacgataatagatggataaagatatatgattctaataatttaacattttggcaaattgattaccttaaagggtgagttaatatgcataactactcctccgttgttttttccctcgttctttttcttaacgttgtttgccatcactctcataatgtaaagatattctaaaatggtaaacttttgcatatcggacgcagaaattggtataaatgttgtaattgtattatttcccgtcaatggactagtcacagctccatcagttttatatcctttagagtatttctcactcgtgtctagcattctagagcattccatgatctgtttatcgttgatattggccggaaagatagattttttattttttattatattactattggcaattgtagatataacttctggtaaatatttttctaccttttcaatttcttctattttcaagccggctatatattctgctatattgttgctagtatcaataccttttctggctaagaagtcatatgtggtattcactatatcagttttaactggtagttccattagcctttccacttctgcagaataatcagaaattggttctttaccagaaaatccagctactataataggctcaccgatgatcattggcaaaatcctatattgtaccagattaatgagagcatatttcatttccaataattctgctagttcttgagacattgatttatttgatgaatctagttggttctctagatactctaccatttctgccgcatacaataacttgttagataaaatcagggttatcaaagtgtttagcgtggctagaatagtgggcttgcatgtattaaagaatgcggtagtatgagtaaaccgttttaacgaattatatagtctccagaaatctgtggcgttacatacatgagccgaatgacatcgaagattgtccaatatttttaatagctgctctttgtccattatttctatatttgactcgcaacaattgtagataccattaatcactgattcctttttcgatgccggacaatagcacaattgtttagctttggactctatgtattcagaattaatagatatatctcttaatacagattgcactatacattttgaaactatgtcaaaaattgtagaacgacgctgttctgcagccatttaactttaaataatttacaaaaatttaaaatgagcatccgtataaaaatcgataaactgcgccaaattgtggcatatttttcagagttcagtgaagaagtgtctataaatgtagactcgacggatgagttaatgtatatttttgccgccttgggcggatctgtaaacatttgggccattatacctctcagtgcatcagtgttctaccgaggagccgaaaacattgtgtttaatcttcctgtgtccaaggtaaaatcgtgtttgtgtagttttcacaatgatgccatcatagatatagaacctgatctggaaaataatctagtaaaactttctagttatcatgtagtaagtgtcgattgtaataaggaactgatgcctattaggacagatactactatttgtctaagtatagatcaaaagaaatcttatgtgtttaattttcacaagtatgaagaaaaatgttgtggtagaaccgtcattcatttagaatggttgttgggctttatcaagtgtattagtcagcatcagcatctggctattatgtttaaagatgacaatattattatgaagactcctggtaatactgatgcattttccagggaatattctatgactgaatgttctcaagaactacaaaagttttctttcaaaatagctatctcgtctctcaacaaactacgaggattcaaaaagagagtcaatgtttttgaaactagaatcgtaatggataatgacgataacattctaggaatgttgttttcggatagagttcaatcctttaagatcaacatctttatggcgtttttagattaatactttcaatgagataaatatgggtggcggagtaagtgttgagctccctaaacgggatccgcctccgggagtacccactgatgagatgttattaaacgtggataaaatgcatgacgtgatagctcccgctaagcttttagaatatgtgcatataggaccactagcaaaagataaagaggataaagtaaagaaaagatatccagagtttagattagtcaacacaggacccggtggtctttcggcattgttaagacaatcgtataatggaaccgcacccaattgctgtcgcacttttaatcgtactcattattggaaaaaggatggaaagatatcagataagtatgaagagggtgcagtattagaatcgtgttggccagacgttcacgacactggaaaatgcgatgttgatttattcgactggtgtcagggggatacgttcgatagaaacatatgccatcagtggatcggttcagcctttaataggagtaatagaactgtagagggtcaacaatcgttaataaatctgtataataagatgcaaacattatgtagtaaagatgctagtgtaccaatatgtgaatcatttttgcatcatttacgcgcacacaatacagaagatagcaaagagatgatcgattatattctaagacaacagtctgcggactttaaacagaaatatatgagatgtagttatcccactagagataagttagaagagtcattaaaatatgcggaacctcgagaatgttgggatccagagtgttcgaatgccaatgttaatttcttgctaacacgtaattataataatttaggactttgcaatattgtacgatgtaatactagcgtgaacaacttacagatggataaaacttcctcattaagattgtcatgtggattaagcaatagtgatagattttctactgttcccgtcaatagagcaaaagtagttcaacataatattaaacactcgttcgacctaaaattgcatttgatcagtttattatctctcttggtaatatggatactaattgtagctatttaaatgggtgccgcagcaagcatacagacgacggtgaatacactcagcgaacgtatctcgtctaaattagaacaagaagcgaatgctagtgctcaaacaaaatgtgatatagaaatcggaaatttttatatccgacaaaaccatggatgtaacctcactgttaaaaatatgtgctctgcggacgcggatgctcagttggatgctgtgttatcagccgctacagaaacatatagtggattaacaccggaacaaaaagcatacgtgccagctatgtttactgctgcgttaaacattcagacgagtgtaaacactgttgttagagattttgaaaattatgtaaaacaaacttgtaattctagcgcggtcgtcgataacaaattaaagatacaaaacgtaatcatagatgaatgttacggagccccaggatctccaacaaatttggaatttattaatacaggatctagcaaaggaaattgtgccattaaggcgttgatgcaattgactactaaggccactactcaaatagcacctagacaagttgctggtacaggagttcagttttatatgattgttatcggtgttataatattggcagcgttgtttatgtactatgccaagcgtatgctgttcacatccaccaatgataaaatcaaacttattttagccaataaggaaaacgtccattggactacttacatggacacattctttagaacttctccgatggttattgctaccacggatatgcaaaactgaaaatatattgataatattttaatagattaacatggaagttatcgctgatcgtctagacgatatagtgaaacaaaatatagcggatgaaaaatttgtagattttgttatacacggtctagagcatcaatgtcctgctatacttcgaccattaattaggttgtttattgatatactattatttgttatagtaatttatatttttacggtacgtctagtaagtagaaattatcaaatgttgttggcgttggtggcgctagtcatcacattaactattttttattactttatactataatagtactagactgacttctaacaaacatctcacctgccataaataaatgcttgatattaaagtcttctatttctaacactattccatctgtggaaaataatactctgacattatcgctaattgacacatcggtgagtgatatgcctataaagtaataatcttctttgggcacatataccagtgtaccaggttctaacaacctatttactggtgctcctgtagcatactttttctttaccttgagaatatccatcgtttgcttggtcaatagcgatatgtgattttttatcaaccactcgaaaaagtaattggagtgttcatatcctctacgggctattgtctcatggccgtgtatgaaatttaagtaacacgactgtggtagatttgttctatagagccggttgccgcaaatagatagaactaccaatatgtctgtacaaatgttaaacattaattgattaacagaaaaaacaatgttcgttctgggaatagaaaccagatcaaaacaaaattcgttagaatatatgccacgtttatacattgaatataaaataactacagtttgaaaaataacagtatcatttaaacatttaacttgcggggttaatttcacaactttactgtttttaaactgttcaaaatatagcatcgatccatgagaaatacgtttagccgcctttaatagaggaaatcccaccgcctttctggatctcaccaacgacgatagttctgaccagcaactcatttcttcatcatccacctgttttaacatataataggcaggagatagatatccgtcattgcaatattccttttcgtaggcacacaatctaatattgataaaatctccattctcttctctgcatttattatcttgtttcggtggctgattaggctgtagtcttggtttaggccttggtctatcgttgttgaatctattttggtcattaaatctttcatttcttcctggtatatttctatcacctcgtttggttggatttttgtctatattatcgtttgtaacatcggtacgggtattcatttatcacaaaaaaaacttctctaaatgagtctactgctagaaaacctcatcgaagaagataccatattttttgcaggaagtatatctgagtatgatgatttacaaatggttattgccggcgcaaaatccaaatttccaagatctatgctttctatttttaatatagtacctagaacgatgtcaaaatatgagttggagttgattcataacgaaaatatcacaggagcaatgtttaccacaatgtataatataagaaacaatttgggtctaggagatgataaactaactattgaagccattgaaaactatttcttggatcctaacaatgaagttatgcctcttattattaataatacggatatgactgccgtcattcctaaaaaaagtggtaggagaaagaataagaacatggttatcttccgtcaaggatcatcacctatcttgtgcattttcgaaactcgtaaaaagattaatatttataaagaaaatatggaatccgcatcgactgagtatacacctatcggagacaacaaggctttgatatctaaatatgcgggaattaatgtcctgaatgtgtattctccttccacatccatgagattgaatgccatttacggattcaccaataaaaataaactagagaaacttagtactaataaggaactagaatcgtatagttctagccctcttcaagaacccattaggttaaatgattttctgggactattggaatgtgttaaaaagaatattcctctaacagatattccgacaaaggattgattactataaatggagaatgttcctaatgtatactttaatcctgtgtttatagagcccacgtttaaacattctttattaagtgtttataaacacagattaatagttttatttgaagtattcgttgtattcattctaatatatgtattttttagatctgaattaaatatgttcttcatgcctaaacgaaaaatacccgatcctattgatagattacgacgtgctaatctagcgtgtgaagacgataaattaatgatctatggattaccatggatgacaactcaaacatctgcgttatcaataaatagtaaaccgatagtgtataaagattgtgcaaagcttttgcgatcaataaatggatcacaaccagtatctcttaacgatgttcttcgcagatgatgattcattttttaagtatttggctagtcaagatgatgaatcttcattatctgatatattgcaaatcactcaatatctagactttctgttattattattgatccaatcaaaaaataaattagaagccgtgggtcattgttatgaatctctttcagaggaatacagacaattgacaaaattcacagactctcaagattttaaaaaactgtttaacaaggtccctattgttacagatggaagggtcaaacttaataaaggatatttgttcgactttgtgattagtttgatgcgattcaaaaaagaatcctctctagctaccaccgcaatagatcctattagatacatagatcctcgtcgcgatatcgcattttctaacgtgatggatatattaaagtcgaataaagtgaacaataattaattctttattgtcatcatgaacggcggacatattcagttgataatcggccccatgttttcaggtaaaagtacagaattaattagacgagttagacgttatcaaatagctcaatataaatgcgtgactataaaatattctaacgataatagatacggaacgggactatggacgcatgataagaataattttgaagcattggaagcaactaaactatgtgatgtcttggaatcaattacagatttctccgtgataggtatcgatgaaggacagttctttccagacattgttgaattctgtgagcgtatggcaaacgaaggaaaaatagttatagtagccgcactcgatgggacatttcaacgtaaaccgtttaataatattttgaatcttattccattatctgaaatggtggtaaaactaactgctgtgtgtatgaaatgctttaaggaggcttccttttctaaacgattgggtgaggaaaccgagatagaaataataggaggtaatgatatgtatcaatcggtgtgtagaaagtgttacatcgactcataatattatattttttatctaaaaaactaaaaataaacattgattaaattttaatataatacttaaaaatggatgttgtgtcgttagataaaccgtttatgtattttgaggaaattgataatgagttagattacgaaccagaaagtgcaaatgaggtcgcaaaaaaactgccgtatcaaggacagttaaaactattactaggagaattattttttcttagtaagttacagcgacacggtatattagatggtgccaccgtagtgtatataggatcggctcctggtacacatatacgttatttgagagatcatttctataatttaggaatgattatcaaatggatgctaattgacggacgccatcatgatcctattctaaatggattgcgtgatgtgactctagtgactcggttcgttgatgaggaatatctacgatccatcaaaaaacaactgcatccttctaagattattttaatttctgatgtaagatccaaacgaggaggaaatgaacctagtacggcggatttactaagtaattacgctctacaaaatgtcatgattagtattttaaaccccgtggcatctagtcttaaatggagatgcccgtttccagatcaatggatcaaggacttttatatcccacacggtaataaaatgttacaaccttttgctccttcatattcagctgaaatgagattattaagtatttataccggtgagaacatgagactgactcgagttaccaaatcagacgctgtaaattatgaaaaaaagatgtactaccttaataagatcgtccgtaacaaagtagttgttaactttgattatcctaatcaggaatatgactattttcacatgtactttatgctgaggaccgtgtactgcaataaaacatttcctactactaaagcaaaggtactatttctacaacaatctatatttcgtttcttaaatattccaacaacatcaactgaaaaagttagtcatgaaccaatacaacgtaaaatatctagcaaaaattctatgtctaaaaacagaaatagcaagagatccgtacgcggtaataaatagaaacgtactactgagatatactaccgatatagagtataatgatttagttactttaataaccgttagacataaaattgattctatgaaaactgtgtttcaggtatttaacgaatcatccataaattatactccggttgatgatgattatggagaaccaatcattataacatcgtatcttcaaaaaggtcataacaagtttcctgtaaattttctatacatagatgtggtaatatctgacttatttcctagctttgttagactagatactacagaaactaatatagttaatagtgtactacaaacaggcgatggtaaaaagactcttcgtcttcccaaaatgttagagacggaaatagttgtcaagattctctatcgccctaatataccattaaaaattgttagatttttccgcaataacatggtaactggagtagagatagccgatagatctgttatttcagtcgctgattaatcaattagtagagatgagataagaacattataataatcaataatatatcttatatcttatatcttatatcttgtttagaaaaatgctaatattaaaatagctaacgctagtaatccaatcggaagccatttgatatctataatagggtatctaatttcctgatttaaatagcggacagctatattctcggtagctactcgtttggaatcacaaacattatttacatctaatttactatctgtaatggaaacgtttcccaatgaaatggtacaatccgatacattgcattttgttatatttttttttaaagaggctggtaacaacgcatcgcttcgtttacatggctcgtaccaacaataatagggtaatcttgtatctattcctatccgtactatgcttttatcaggataaatacatttacatcgtatatcgtctttgttagcatcacagaatgcataaatttgttcgtccgtcatgataaaaatttaaagtgtaaatataactattatttttatagttgtaataaaaagggaaatttgattgtatactttcggttctttaaaagaaactgacttgataaaaatggctgtaatctctaaggttacgtatagtctatatgatcaaaaagagattaatgctacagatattatcattagtcatgttaaaaatgacgacgatatcggtaccgttaaagatggtagactaggtgctatggatggggcattatgtaagacttgtgggaaaacggaattggaatgtttcggtcactggggtaaagtaagtatttataaaactcatatagttaagcctgaatttatttcagaaattattcgtttactgaatcatatatgtattcactgcggattattgcgttcacgagaaccgtattccgacgatattaacctaaaagagttatcgggacacgctcttaggagattaaaggataaaatattatccaagaaaaagtcatgttggaacagcgaatgtatgcaaccgtatcaaaaaattactttttcaaagaaaaaggtttgtttcgtcaacaagttggatgatattaacgttcctaattctctcatctatcaaaagttaatttctattcatgaaaagttttggccattattagaaattcatcaatatccagctaacttattttatacagactactttcccatccctccgctgattattagaccggctattagtttttggatagatagtatacccaaagagaccaatgaattaacttacttattaggtatgatcgttaagaattgtaacttgaatgctgatgaacaggttatccagaaggcggtaatagaatacgatgatattaaaattatttctaataacacttccagtatcaatttatcatatattacatccggcaaaaataatatgattagaagttatattgtcgcccgacgaaaagatcagaccgctagatctgtaattggtcccagtacatctatcaccgttaatgaggtaggaatgcccgcatatattagaaatacacttacagaaaagatatttgttaatgcctttacagtggataaagttaaacaactattagcgtcaaaccaagttaaattttactttaataaacgattaaaccaattaacaagaatacgccaaggaaagtttattaaaaataaaatacatttattgcctggtgattgggtagaagtagctgttcaagaatatacaagtattatttttggaagacagccgtctctacatagatacaacgtcatcgcttcatctatcagagctaccgaaggagatactatcaaaatatctcccggaattgccaactctcaaaatgctgatttcgacggagatgaagaatggatgatattggagcaaaatcctaaagccgtaattgaacaaagtattcttatgtatccgacgacgttactcaaacacgatattcatggagcccccgtttatggatctattcaagatgaaatcgtagcagcgtattcattgtttagaatacaagatctttgtttagatgaagtattgaacatcttggggaaatatggaagaaagttcgatcctaaaggtaaatgtaaattcagcggtaaagatatctatacttacttgataggtgaaaagattaattatccgggtctcttaaaggatggtgaaattattgcaaacgacgtagatagtaattttgttgtggctatgaggcatctgtcattggctggactcttatccgatcataagtcgaacgtggaaggtatcaactttattatcaagtcatcttatgtttttaagagatatctatctatttacggttttggggtgacattcaaagatctgagaccaaattcgacgttcactaataaattggaggccatcaacgtagaaaaaatagaacttatcaaagaagcatacgccaaatatctcaacgatgtaagagacgggaaaatagttccattatctaaagctttagaggcggactatgtggaatccatgttatccaacttgacaaatcttaatatccgagagatagaagaacatatgagacaaacgctgatagatgatccagataataacctcctgaaaatggccaaagcgggttataaagtaaatcccacagaactaatgtatattctaggtacttatggacaacagaggattgatggtgaaccagcagagactcgagtattgggtagagtcttaccttactatcttccagactctaaggatccagaaggaagaggttatattcttaattctttaacaaaaggattaacaggttctcaatattacttttcgatgctggttgccagatctcaatctactgatatcgtctgtgaaacatcacgtaccggaacactggctagaaaaatcattaaaaagatggaggatatggtggtcgacggatacggacaagtagttataggtaatacgctcatcaagtacgccgccaattataccaaaattctaggctcagtatgtaaacctgtagatcttatctatccagatgagtccatgacttggtatttggaaattagtgctctgtggaataaaataaaacagggattcgtttactctcagaaacagaaacttgcaaaaaagacattggcgccgtttaatttcctagtattcgtcaaacccaccactgaggataatgctattaaggttaaggatctgtacgatatgattcataacgtcattgatgatgtgagagagaaatacttctttacggtatctaatatagattttatggagtatatattcttgacgcatcttaatccttctagaattagaattacaaaagaaacggctatcactatctttgaaaagttctatgaaaaactcaattatactctaggtggtggaactcctattggaattatttctgcacaggtattgtctgagaagtttacacaacaagccctgtccagttttcacactactgaaaaaagtggtgccgtcaaacaaaaacttggtttcaacgagtttaataacctgactaatttgagtaagaataagaccgaaattatcactctggtatccgatgatatctctaaacttcaatctgttaagattaatttcgaatttgtatgtttgggagaattaaatccaaacatcactcttcgaaaagaaacagataggtatgtagtagatataatagtcaatagattatacatcaagagagcagaaattaccgaattagtcgtcgaatatatgattgaacgatttatctcctttagcgtcattgtaaaggaatggggtatggagacattcattgaggacgaggataatattagatttactgtctacctaaatttcgttgaaccggaagaattgaatcttagtaagtttatgatggttcttccgggtgccgccaacaagggcaagattagtaaattcaagattcctatctctgactatacgggatatgacgacttcaatcaaacaaaaaagctcaataagatgactgtagaactcatgaatctaaaagaattgggttctttcgatttggaaaacgtcaacgtgtatcctggagtatggaatacatacgatatcttcggtatcgaggccgctcgtgaatacttgtgcgaagccatgttaaacacctatggagaagggttcgattatctgtatcagccttgtgatcttctcgctagtttactatgtgctagttacgaaccagaatcagtgaataaattcaagttcggcgcagctagtactcttaagagagctacgttcggagacaataaagcattgttaaacgcggctcttcataaaaagtcagaacctattaacgataatagtagctgccacttttttagcaaggtccctaatataggaactggatattacaaatactttatcgacttgggtcttctcatgagaatggaaaggaaactatctgataagatatcttctcaaaagatcaaggaaatggaagaaacagaagacttttaattcttatcaataacatatttttctatgatctgtcttttaaacgatggattttccacaaatgcgcctctcaagtccctcatagaatgatacacgtataaaaaatatagcataggcgatgactccttatttttagacattagatatgccaaaatcatagccccgcttctatttactcccgcagcacaatgaaccaacacgggctcgtttcgttgatcacatttagataaaaaggcggtcacgtcgtcaaaatatttactaatatcggtagttgtatcatctaccaacggtatatgaataatattaatattagagttaggcaatgtatatttatccatcgtcaaatttaaaacatatttgaacttaacttcagatgatggtgcatccatagcatttttataatttcccaaatacacattattggttacccttgtcattatagtgggagatttggctttgtgcatatctccagttgaacgtagtagtaagtatttatacaaacttttcttatccatttataacgtacaaatggataaaactactttatcggtaaacgcgtgtaatttagaatacgttagagaaaaggctatagtaggcgtacaagcagccaaaacatcaacacttatattctttgttattatattggcaattagtgcgctattactctggtttcagacgtctgataatccagtctttaatgaattaacgagatatatgcgaattaaaaatacggttaacgattggaaatcattaacggatagcaaaacaaaattagaaagtgatagaggtaaacttctagccgctggtaaggatgatatattcgaattcaaatgtgtggatttcggcgcctattttatagctatgcgattggataagaaaacatatctgccgcaagctattaggcgaggtactggagacgcgtggatggttaaaaaggcggcaaaggtcgatccatctgctcaacaattttgtcagtatttgataaaacacaagtctaataatgttattacttgtggtaatgagatgttaaatgaattaggttatagcggttattttatgtcaccgcattggtgttccgattttagtaatatggaatagtgttagataaatgcggtaacaaatgttcctgtaaggaaccataacagcttagatttaacgttaaagatgagcataaacataataaacaaaattacaatcaaacctataacattaatatcaaacaatccaaaaaatgaaatcagtggagtagtaaacgcgtacataactcctggataacgtttagcagctgccgttcctattctagaccaaaaattcggtttcatgttttcgaagcggtgttctgcaacaagtcggggatcgtgttctacatatttggcggcattatccagtatctgcctattgatcttcatttcgttttcgattctggctatttcaaaataaaatcccgatgatagacctccagactttataatttcatctacgatgttcagcgccgtagtaactctaataatataggctgataagctaacatcataccctcctgtatatgtgaatatggtatgatttttgtccattacaagctcggttttaactttattgcctgtaataatttctctcatctgtaggatatctatttttttgtcatgcattgccttcaagacgggacgaagaaacgtaatatcctcaataacgttatcgttttctacaataactacatattctacctttttattttctaactcggtaaaaaaattagaatcccatagggctaaatgtctagcgatatttcttttcgtttcctctgtacacatagtgttacaaaaccctgaaaagaagtgagtatacttgtcatcatttctaatgtttcctccagtccactgtataaacgcataatccttgtaatgatctggatcatccttgactaccacaacatttcttttttctggcataacttcgttgtcctttacatcatcgaacttctgatcattaatatgctcatgaacattaggaaatgtttctgatggaggtctatcaataactggcacaacaataacaggagttttcaccgccgccatttagttattgaaattaatcatatacaactctttaatacgagttatattttcgtctatccattgtttcacatttacatatttcgacaaaaagatataaaatgcgtattccaatgcttctctgtttaatgaattactaaaatatacaaacacgtcactgtctggcaataaatgatatcttagaatattgtaacaatttattttgtattgcacatgttcgtgatctatgagttcttcttcgaatggcataggatctccgaatctgaaaacgtataaataggagttagaataataatatttgagagtattggtaatatataaactctttagcggtataattagtttttttctctcaatttctatttttagatgtgatggaaaaatgactaattttgtagcattagtatcatgaactctaatcaaaatcttaatatcttcgtcacacgttagctctttgaagtttttaagagatgcatcagttggttctacagatggagtaggtgcaacaattttttgttctacacatgtatgtactggagccattgttttaactataatggtgcttgtatcgaaaaactttaatgcagatagcggaagctcttcgccgcgactttctacatcgtaattgggttctaacgccgatctctgaatggatactagttttctaagttctaatgtgattctctgaaaatgtaaatccaattcctccggcattatagatgtgtatacatcggtaaataaaactatagtatccaacgatcccttctcgcaaattctagtcttaaccaaaaaatcgtatataaccacggagatggcgtatttaagagtggattcttctaccgttttgttcttggatgtcatataggaaactataaagtccgcactactgttaagaatgattactaacgcaactatatagttcaaattaagcattttggaaacataaaataactctgtagacgatacttgactttcgaataagtttgcagacaaacgaagaaagaacagacctctcttaatttcagaagaaaactttttttcgtattcctgacgtctagagtttatatcaataagaaagttaagaattagtcggttaatgttgtatttcattacccaagtttgagatttcataatattatcaaaagacatgataatattaaagataaagcgctgactatgaacgaaatagctatatggttcgctcaaaaatatagtcttgttaaacgtggaaacgataactgtatttttaatcacgtcagcggcatctaaattaaatataggtatatttattccacacactctacaatatgccacaccatcttcataataaataaattcgttagcaaaattattaattttagtgaaatagttagcgtcaactttcatagcttccttcaatctaatttgatgctcacacggtgcgaattctactctaacatcccttttccatgcctcaggttcatcgatctctataatatctagttttttgcgtttcacaaacacaggctcgtctctcgcgatgagatctgtatagtaactatgtaaatgataactagatagaaagatgtagctatatagatgacgatcctttaagagaggtataataactttaccccaatcagatagactgttgttatggtcttcggaaaaagaatttttataaatttttccagtattttccaaatatacgtacttaacatctaaaaaatccttaatgataataggaatggataatccgtctattttataaagaaatacatatcgcacattatacttttttttggaaatgggaataccgatgtgtctacataaatatgcaaagtctaaatattttttagagaatcttagttggtccaaattcttttccaagtacggtaatagatttttcatattgaacggtatcttcttaatctctggttctagttccgcattaaatgatgaaactaagtcactatttttataactaacgattacatcacctctaacatcatcatttaccagaatactgatcttcttttgtcgtaaatacatgtctaatgtgttaaaaaaaagatcatacaagttatacgtcatttcatctgtggtattcttgtcattgaaggataaactcgtactaatctcttctttaacagcctgttcaaatttatatcctatatacgaaaaaatagcaaccagtgtttgatcatccgcgtcaatattctgttctatcgtagtgtataacaatcgtatatcttcttctgtgatagtcgatacgttataaaggttgataacgaaaatatttttatttcgtgaaataaagtcatcgtaggattttggacttatattcgcgtctagtagatatgcttttatttttggaatgatctcaattagaatagtctctttagagtccatttaaagttacaaacaactaggaaattggtttatgatgtataatttttttagtttttatagattctttattctatacttaaaaaatgaaaataaatacaaaggttcttgagggttgtgttaaattgaaagcgagaaataatcataaattatttcattatcgcgatatccgttaagtttgtatcgtaatggcgtggtcaattacaaataaagcggatactagtagcttcacaaagatggctgaaatcagagctcatctaaaaaatagcgctgaaaataaagataaaaacgaggatattttcccggaagatgtaataattccatctactaagcccaaaaccaaacgagccactactcctcgtaaaccagcggctactaaaagatcaaccaaaaaggaggaagtggaagaagaagtagttatagaggaatatcatcaaacaactgaaaaaaattctccatctcctggagtcggcgacattgtagaaagcgtggctgctgtagagctcgatgatagcgacggggatgatgaacctatggtacaagttgaagctggtaaagtaaatcatagtgctagaagcgatctttctgacctaaaggtggctaccgacaatatcgttaaagatcttaagaaaattattactagaatctctgcagtatcgacggttctagaggatgttcaagcagctggtatctctagacaatttacttctatgactaaagctattacaacactatctgatctagtcaccgagggaaaatctaaagttgttcgtaaaaaagttaaaacttgtaagaagtaaatgcgtgcacttttttataaagatggtaaactctttaccgataataattttttaaatcctgtatcagacgataatccagcgtatgaggttttgcaacatgttaaaattcctactcatttaacagatgtagtagtatatgaacaaacgtgggaagaggcattaactagattaatttttgtgggaagcgattcaaaaggacgtagacaatacttttacggaaaaatgcatgtacagaatcgcaacgctaaaagagatcgtatttttgttagagtatataacgttatgaaacgaattaattgttttataaacaaaaatataaagaaatcgtccacagattccaattatcagttggcggtttttatgttaatggaaactatgttttttattagatttggtaaaatgaaatatcttaaggagaatgaaacagtagggttattaacactaaaaaataaacacatagaaataagtcccgatgaaatagttatcaagtttgtaggaaaggacaaagtttcacatgaatttgttgttcataagtctaatagactatataaaccgctattgaaactgacggatgattctagtcccgaagaatttctgttcaacaaactaagtgaacgaaaggtatacgaatgtatcaaacagtttggtattagaatcaaggatctccgaacgtatggagtcaattatacgtttttatataatttttggacaaatgtaaagtccatatctcctcttccgtcaccaaaaaagttaatagcgttaactatcaaacaaactgctgaagtggtaggtcatactccatcaatttcaaaaagagcttacatggcaacgactattttagaaatggtaaaggataaaaattttttagatgtagtatctaaaactacgttcgatgaattcctatctatagtcgtagatcacgttaaatcatctacggatggatgatatagatctttacacaaataattacaagaccgataaatggaaatggataagcgtataaaatctctcgcaatgacagctttcttcggagagctaaacacattagatattatggcattgataatgtctatatttaaacgccatccaaacaataccattttttcagtggataaggatggtcagtttatgattgatttcgaatacgataattataaggcttctcaatatttggatctgaccctcactccgatatctggagatgaatgcaagactcacgcatcgagtatagccgaacaattggcgtgtgcggatattattaaagaggatattagcgaatatatcaaaactactccccgtcttaaacgatttataaaaaaataccgcaatagatcagatactcgcatcagtcgagatacagaaaagcttaaaatagctctagctaaaggcatagattacgaatatataaaagacgcttgttaataagtaaatgaaaaaaaactagtcgtttataataaaacacgatatggatgccaacgtagtatcatcttctactattgcaacgtatatagacgctttagcgaagaatgcttcagaattagaacagaggtctaccgcatacgaaataaataatgaattggaactagtatttattaagccgccattaattactttgacaaatgtagtgaatatctctacgattcaggaatcgtttattcgatttaccgttactaataaggaaggtgttaaaattagaactaagattccattatctaaggtacatggtctagatgtaaaaaatgtacagttagtagatgctatagataacatagtttgggaaaagaaatcattagtgacggaaaatcgtcttcacaaagaatgcttgttgagactatcgacagaggaacgtcatatatttttggattacaagaaatatggatcctctatccgactagaattagtcaatcttattcaagcaaaaacaaaaaactttacgatagactttaagctaaaatattttctaggatccggtgcccagtctaaaagttctttattacacgctattaatcatccaaagtcaaggcctaatacatctctggaaatagaattcacacctagagacaatgaaaaagttccatatgatgaactaataaaggaattgacgactctatcacgtcatatatttatggcttctccagagaatgtaattctttctccgcctattaacgcacctataaagacttttatgttgcctaaacaagatatagtaggtctggatctggaaaatctatacgctgtaactaagactgacggcattcctataactatcagagttacatcaaacgggttgtattgttattttacacatcttggttatattattagatatcctgttaagagaataatagattccgaagtagtagtctttggtgaggcagttaaggataagaactggaccgtatatctcattaagctaatagagcctgtgaatgcaatcaatgatagactagaagaaagtaagtatgttgaatctaaactagtggatatttgtgatcggatagtattcaagtcaaagaaatacgaaggtccgtttactacaactagtgaagtcgtcgatatgttatctacatatttaccaaagcaaccagaaggtgttattctgttctattcaaagggacctaaatctaacattgattttaaaattaaaaaggaaaatactatagaccaaactgcaaatgtagtatttaggtacatgtccagtgaaccaattatctttggagaatcgtctatctttgtagagtataagaaatttagcaacgataaaggctttcctaaagaatatggttctggtaagattgtgttatataacggcgttaattatctaaataatatctattgtttggaatatattaatacacataatgaagtgggtattaagtccgtggttgtacctattaagtttatagcagaattcttagttaatggagaaatacttaaacctagaatcgataaaaccatgaaatatattaactcagaagattattatggaaatcaacataatatcatagtcgaacatttaagagatcaaagcatcaaaataggagatatctttaacgaggataaactatcggatgtgggacatcaatacgccaataatgataaatttagattaaatccagaagttagttattttacgaataaacgaactagaggaccgttgggaattttatcaaactacgtcaagactcttcttatttctatgtattgttccaaaacatttttagacgattccaacaaacgaaaggtattggcgattgattttggaaacggtgctgacctggaaaaatacttttatggagagattgcgttattggtagcgacggatccggatgctgatgctatagctagaggaaatgaaagatacaacaaattaaactctggaattaaaaccaagtactacaaatttgactacattcaggaaactattcgatccgatacatttgtctctagtgtcagagaagtattctattttggaaagtttaatatcatcgactggcagtttgctatccattattcttttcatccgagacattatgctaccgtcatgaataacttatccgaactaactgcttctggaggcaaggtattaatcactaccatggacggagacaaattatcaaaattaacagataaaaagacttttataattcataagaatttacctagtagcgaaaactatatgtctgtagaaaaaatagctgatgatagaatagtggtatataatccatcaacaatgtctactccaatgactgaatacattatcaaaaagaacgatatagtcagagtgtttaacgaatacggatttgttcttgtagataacgttgatttcgctacaattatagaacgaagtaaaaagtttattaatggcgcatctacaatggaagatagaccgtctacaaaaaactttttcgaactaaatagaggagccattaaatgtgaaggtttagatgtcgaagacttacttagttactatgttgtttatgtcttttctaagcggtaaataataatatggtatgggttctgatatccccgttctaaatgcattaaataattccaatagagcgatttttgttcctataggaccttccaactgtggatactctgtattgttaatagatatattaatacttttgtcgggtaacagaggttctacgtcttctaaaaataaaagtttgataacatctggcctgttcataaataaaaacttggcgattctatatatactcttattatcaaatctagccattgtcttatagatgtgagctactgtaggtgtaccatttgattttctttctaatactatatatttctctcgaagaagttcttgcacatcatctgggaataaaatactactgttgagtaaatcagttattttttttatatcgatattgatggacatttttatagttaaggataataagtatcccaaagtcgataacgacgataacgaagtatttatacttttaggaaatcacaatgactttatcagattaaaattaacaaaattaaaggagcatgtatttttttctgaatatattgtgactccagatacatatggatctttatgcgtcgaattaaatgggtctagttttcagcacggtggtagatatatagaggtggaggaatttatagatgctggaagacaagttagatggtgttctacatccaatcatatatctgaagatatacccgaagatatacacactgataaatttgtcatttatgatatatacacttttgacgctttcaagaataaacgattggtattcgtacaggtacctccgtcgttaggagatgatagtcatttgactaatccgttattgtctccgtattatcgtaattcagtagccagacaaatggtcaatgatatgatttttaatcaagattcatttttaaaatatttattagaacatctgattagaagccactatagagtttctaaacatataacaatagttagatacaaggataccgaagaattaaatctaacgagaatatgttataatagagataagtttaaggcgtttgtattcgcttggtttaacggcgtttcggaaaatgaaaaggtactagatacgtataaaaaggtatctaatttgatataatgaattcagtgactgtatcacacgcgccatatactattacttatcacgatgattgggaaccagttatgagtcaattggtagagttttataacgaagtagccagttggctgctacgagacgagacgtcgcctattcctgataagttctttatacagttgaaacaaccgcttagaaataaacgagtatgtgtgtgtggtatagatccgtatccgaaagatggaactggtgtaccgttcgaatcaccaaattttacaaaaaaatcaattaaggagatagcttcatctatatctagattaaccggagtaattgattataaaggttataaccttaatataatagacggggttataccctggaattattacttaagttgtaaattaggagaaacaaaaagtcacgcgatctactgggataagatttccaagttactgctgcagcatataactaaacacgttagtgttctttattgtttgggtaaaacagatttctcgaatatacgggcaaagttagaatccccggtaactaccatagtgggatatcatccagcggctagagaccgccaattcgagaaagatagatcatttgaaattatcaacgttttactggaattagacaacaaggtacctataaattgggctcaagggtttatttattaatgctttagtgaaattttaacttgtgttctaaatggatgcggctattagaggtaatgatgttatctttgtccttaagactataggtgtcccatcagcatgtagacaaaatgaagatccaagattcgtagaagcatttaaatgcgacgagttaaaaagatatattgataataatccagaatgtacactattcgaaagtcttagggatgaggaagcatactctatagtcagaattttcatggatgtagatttagacgcgtgtctagacgaaatagattatttaacggctattcaagattttattatcgaggtgtcaaactgtgtagctagattcgcgtttacagaatgcggtgccattcatgaaaatgtaataaaatccatgagatctaatttttcattgactaagtctacaaatagagataaaacaagttttcatattatctttttagacacgtataccactatggatacattgatagctatgaaacgaacactattagaattaagtagatcatctgaaaatccactaacaagatcgatagacactgccgtatataggagaaaaacaactcttcgggttgtaggtactaggaaaaatccaaattgcgacactattcatgtaatgcaaccaccgcatgataatatagaagattacctattcacttacgtggatatgaacaacaatagttattacttttctctacaacgacgattggaggatttagttcctgataagttatgggaaccagggtttatttcattcgaagacgctataaaaagagtttcaaaaatattcattaattctataataaactttaatgatctcgatgaaaataattttacaacggtaccactggtcatagattacgtaacaccttgtgcattatgtaaaaaacgatcgcataaacatccgcatcaactatcgttggaaaatggtgctattagaatttacaaaactggtaatccacatagttgtaaagttaaaattgttccgttggatggtaataaactgtttaatattgcacaaagaattttagacactaactctgttttattaaccgaacgaggagactatatagtttggattaataattcatggaaatttaacagcgaagaacccttgataacaaaactaattctgtcaataagacatcaactacctaaggaatattcaagcgaattactctgtccgaggaaacgaaagactgtagaagctaacatacgagacatgttagtagattcagtagagaccgatacctatccggataaacttccgtttaaaaatggtgtattggacctggtagacggaatgttttactctggagatgatgctaaaaaatatacgtgtactgtatcaaccggatttaaatttgacgatacaaagttcgtcgaagacagtccagaaatggaagagttaatgaatatcattaacgatatccaaccattaacggatgaaaataagaaaaatagagagctatatgaaaaaacattatctagttgtttatgtggtgctaccaaaggatgtttaacattcttttttggagaaactgcaactggaaagtcgacaaccaaacgtttgttaaagtctgctatcggtgacctgtttgttgagacgggtcaaacaattttaacagatgtattggataaaggacctaatccatttatcgctaacatgcatttgaaaagatctgtattctgtagcgaactacctgattttgcctgtagtggatcaaagaaaattagatctgataatattaaaaagttgacagaaccttgtgtcattggaagaccgtgtttctccaataaaattaataatagaaaccatgctacaatcattatcgatactaattacaaacctgtctttgataggatagataacgcattaatgagaagaattgccgtcgtgcgattcagaacacacttttctcaaccttctggtagagaggctgctgaaaataatgacgcgtacgataaagtcaaactattagacgaggggttagatggtaaaatacaaaataatagatatagatttgcatttctatacttgttggtgaaatggtacaaaaaatatcatgttcctattatgaaactatatcctacacccgaagagattcctgactttgcattctatctcaaaataggtactctgttagtatctagctctgtaaagcatattccattaatgacggacctctccaaaaagggatatatattgtacgataatgtggttactcttccgttgactactttccaacagaaaatatccaagtattttaattctagactatttggacacgatatagagagcttcatcaatagacataagaaatttgccaatgttagtgatgaatatctgcaatatatattcatagaggatatttcatctccgtaaatatatgctcatatatttatagaagatatcacatatctaaatgaataccggaattatagatttatttgataatcatgttgatagtataccaactatattacctcatcagttagctactctagattatctagttagaactatcatagatgagaacagaagcgtgttattgttccatattatgggatcaggtaaaacaataatcgctttgttgttcgccttggtagcttccagatttaaaaaggtttacattctagtgccgaacatcaacatcttaaaaattttcaattataatatgggtgtagctatgaacttgtttaatgacgaattcatagctgagaatatctttattcattccacaacaagtttttattctcttaattataacgataacgtcattaattataacggattatctcgctacaataactctatttttatcgttgatgaggcacataatatctttgggaataatactggagaacttatgaccgtgataaaaaataaaaacaagattccttttctactattgtctggatctcccattactaacacacctaatactctgggtcatattatagatttaatgtccgaagagacgatagattttggtgaaattattagtcgtggtaagaaagtaattcagacacttcttaacgaacgaggtgtgaatgtacttaaggatttgcttaaaggaagaatatcatattacgaaatgcctgataaagatctaccaacgataagatatcacggacgtaagtttctagatactagagtagtatattgtcacatgtctaaacttcaagagagagattatatgattactagacgacagctatgttatcatgaaatgtttgataaaaatatgtataacgtgtcaatggcagtattgggacaacttaatctgatgaataatttagatactttatttcaggaacaggataaggaattgtacccaaatctgaaaataaataatggcgtgttatacggagaagaattggtaacgttaaacattagttccaaatttaagtactttatcaatcggatacagacactcaacggaaaacattttatatacttttctaattctacatatggtggattggtaattaaatatatcatgctcagtaatggatattctgaatataatggttctcagggaactaatccacatatgataaacggcaaaccaaaaacatttgctatcgttactagtaaaatgaaatcgtctttagaggatctattagatgtgtataattctcctgaaaacgatgatggtagtcaattgatgtttttgttttcatcaaacattatgtccgaatcctatactctgaaagaggtaaggcatatttggtttatgactatcccagatactttttctcaatacaaccaaattcttggacgatctattagaaaattctcttacgccgatatttctgaaccagttaatgtatatcttttagccgccgtatattccgatttcaatgacgaagtaacgtcattaaacgattacacacaggatgaattaattaatgttttaccatttgacatcaaaaagctgttgtatctaaaatttaagacgaaagaaacgaatagaatatactctattcttcaagagatgtctgaaacgtattctcttccaccacatccatcaattgtaaaagttttattgggagaattggtcagacaatttttttataataattctcgtattaagtataacgactccaagttacttaaaatggttacatcagttataaaaaataaagaagacgctaggaattacatagatgatattgtaaacggtcacttctttgtatcgaataaagtatttgataaatctcttttatacaaatacgaaaacgatattattacagtaccgtttagactttcctacgaaccatttgtttggggagttaactttcgtaaagaatataacgtggtatcttctccataaaactgatgagatatataaagaaataaatgtcgagctttgttaccaatggatacctttccgttacattggaacctcatgagctgacgttagacataaaaactaatattaggaatgccgtatataagacgtatctccatagagaaattagtggtaaaatggccaagaaaatagaaattcgtgaagacgtggaattacctctcggcgaaatagttaataattctgtagttataaacgttccgtgtgtaataacctacgcgtattatcacgttggggatatagtcagaggaacattaaacatcgaagatgaatcaaatgtaactattcaatgtggagatttaatctgtaaactaagtagagattcgggtactgtatcatttagcgattcaaagtactgcttttttcgaaatggtaatgcgtatgacaatggcagcgaagtcactgccgttctaatggaggctcaacaaggtatcgaatctagttttgtttttctcgcgaatatcgtcgactcataagaaagagaatagcggtaagtataaacacgaatactatggcaataattgcgaatgttttattcccttcgatatatttttgataatatgaaaaacatgtctctctcaaatcggacaaccatctcataaaatagttctcgcgcgctggagaggtagttgctgctcgtataatctccccagaataatatacttgcgtgtcgtcgttcaatttatacggatttctatagttctctgttatataatacggttttccatcatgattagacgacgacaatagtgttctaaatttagatagttgatcagaatgaatgtttattggcgttggaaaaattatccatacagcgtctgcagagtgcttgatagttgttcctagatatgtaaaataatccaacgtactaggtagcaaattgtctagataaaatactgaatcaaacggcgcagacgtattagcggatctaatggaatccaattgattgactatcttttgaaaatatacatttttatgatccgatacttgtaagaatatagaaataatgataagtccatcatcgtgtttttttgcctcttcataagaactatattttttcttattccaatgaacaagattaatctctccagagtatttgtacacatctatcaagtgattggatccataatcgtcttcctttccccaatatatatgtagtgatgataacacatattcattggggagaaaccctccacttatatatcctcctttaaaattaatccttactagttttccagtgttctggatagtggttggtttcgactcattataatgtatgtctaacggcttcaatcgcgcgttagaaattgcttttttagtttctatattaataggagatagttgttgcggcatagtaaaaatgaaatgataactgtttaaaaatagctcttagtatgggaattacaatggatgaggaagtgatatttgaaactcctagagaattaatatctattaaacgaataaaagatattccaagatcaaaagacacgcatgtgtttgctgcgtgtataacaagtgacggatatccgttaataggagctagaagaacttcattcgcgttccaggcgatattatctcaacaaaattcagattctatctttagagtatccactaaactattacggtttatgtactacaatgaactaagagaaatctttagacggttgagaaaaggttctatcaacaatatcgatcctcacttcgaagagttaatattattgggtggtaaactagataaaaaggaatctattaaagattgtttaagaagagaattaaaagaggaaagtgatgaacgtataacagtaaaagaatttggaaatgtaattctaaaacttacaacacgggataaattatttaataaagtatatataagttattgcatggcgtgttttattaatcaatcgttggaggatttatcgcatactagtatttacaatgtagaaattagaaagattaaatcattaaatgattgtattaacgacgataaatacgaatatctgtcttatatttataatatgctagttaatagtaaatgaacttttacagatctagtataattagtcagattattaagtataatagacgactagctaagtctattatttgcgaggatgactctcaaattattacactcacggcattcgttaaccaatgcctatggtgtcataaacgagtatccgtgtccgctattttattaactactgataacaaaatattagtatgtaacagacgagatagttttctctattctgaaataattagaactagaaacatgtttagaaagaaacgattatttctgaattattccaattatttgtccaaacaggaaagaagtatactatcgtcatttttttctctatatccagctactgctgataatgatagaatagatgctatttatccgggtggcatacccaaaaggggtgagaatgttccagagtgtttatccagggaaattaaagaagaagttaatatagacaattcttttgtattcatagacactcggttttttattcatggcatcatagaagataccattattaataaattttttgaggtaatcttctttgtcggaagaatatctctaacgagtgatcaaatcattgatacatttaaaagtaatcatgaaatcaaggatctaatatttttagatccgaattcaggtaatggactccaatacgaaattgcaaaatatgctctagatactgcaaaactcaaatgttatggccatagaggatgttattacgaatcattaaaaaaattaactgaggatgattgattagaaaatataaattaatttaccatcgtgtatttttataacgggattgtccggcatatcatgtagatagttaccgtctacatcgtatactcgaccatctacgcctttaaatcctctatttattgacattaatctattagaattggaataccaaatattagtaccctcaattagtttattggtaatattttttttagacgatagatcgatggctcttgaaaccaaggttttccaaccggactcattgtcgatcggtgagaagtctttttcattagcatgaatccattctaatgatgtatgtttaaacactctaaacaattggacaaattcttttgatttgctttgaatgatttcaaataggtcttcgtctacagtaggcataccattagataatctagccattataaagtgcacgtttacatatctacgttctggaggagtaagaacgtgactattgagacgaatggctcttcctactatctgacgaagagacgcctcgttccaagtcatatctagaatgaagatatcattgattgagaagaagctaataccctcgcctccactagaagagaatacgcatgttttaatgcattctccgttagtgtttgattcttggttaaactcagccaccgccttgattctagtatcttttgttctagatgagaactctatattagagataccaaagactttgaaatatagtaataagatttctattcctgactgattaacaaatggttcaaagactagacatttaccatgggatgctaatattcccaaacatacatctataaatttgacgcttttctcttttaattcagtaaatagagagatatcagccgcactagcatcccctttcaatagttctccctttttaaaggtatctaatgcggatttagaaaactctctatttcttaatgaatttttaaaatcattatatagtgttgctatctcttgcgcgtattcgcccggatcacgattttgtctttcaggaaagctatcgaacgtaaacgtagtagccatacgtctcagaattctaaatgatgatatacctgtttttatttcagcgagtttagccttttgataaatttcttcttgctttttcgacatattaacgtatcgcattaatactgttttcttagcgaatgatgcagacccttctacgtcatcaaaaatagaaaactcgttattaactatgtacgaacataggcctcctagtttggagactaattctttctcatcaactagacgtttattctcaaatagcgattggtgttgtaaggatcctggtcgtagtaagttaaccaacatggtgaattcttgcacactattgacgataggtgtagccgataaacaaatcatcttatggttttttaacgcaatggttttagataaaaaattatatactgaacgagtaggacggatcttaccatcttctttgattaatgatttagaaatgaagttatgacattcatcaataatgacgcatattctactcttggaattaatagttttgatattagtaaaaaatttatttctaaaattttgatcatcgtaattaataaaaatacaatccttcgttatctctggagcgtatctgagtatagtgttcatccaaggatcttctatcaaagcctttttcaccaataagataatagcccaattcgtataaatatccttaagatgtttgagaatatatacagtagtcattgttttaccgacacccgtttcatggaacaataaaagagaatgcatactgtctaatcctaagaaaactcttgctacaaaatgttgataatccttgaggcgtactacgtccgaccccatcatttcaacaggcatattagtagttctgcgcaatgcataatcgatataggccgcgtgtgatttactcatttatgagtgataagtaataactatgttttaaaaatcacagcagtagtttaactagtcttctctgatgtttgttttcgatacttttcgaatcagaagtcatactagaataaagcagcgagtgaacgtaatagagagcttcgtatactctattcgaaaactctaagaacttattaatgaattccgtatccactggatcgtttaaaatactaaattgaacactgttcacatccttccaagaagaagacttagtgacggacttaacatgagacataaataaatccaaattttttttacaaacatcactagccaccataatggcgctatctttcaaccagctatcgcttacgcattttagcagtctaacatttttaaagagactacaatatattctcatagtatcgattacacctctaccgaataaagttggaagtttaataatacaatatttttcgtttacaaaatcaaataatggtcgaaacacgtcgaaggttaacatcttataatcgctaatgtatagattgttttcagtgagatgattattagatttaatagcatctcgttcacgtttgaacagtttattgcgtgcgctgaggtcggcaactacggcgtccgctttagtactcctcccataatactttacgctattaatctttaaaatttcatagactttatctagatcgctttctggtaacatgatatcatgtgtaaaaagttttaacatgtcggtcggcattctatttagatcattaactctagaaatctgaagaaagtaattagctccgtattccagactaggtaatgggcttttacctagagacagattaagttctggcaatgtttcataaaatggaagaaggacatgcgttccctcccggatattttttacaatttcatccatttacaactctatagtttgttttcattattattagttattatctcccataatcttggtaatacttaccccttgatcgtaagataccttatacaggtcattacatacaactaccaattgtttttgtacataatagattggatggttgacatccatggtggaataaactactcgaacagatagtttatctttccccctagatacattggccgtaatagttgtcggcctaaagaatatctttggtgtaaagttaaaagttagggttcttgttccattattgctttttgtcagtagttcattataaattctcgagatgggtccgttctctgaatatagaacatcatttccaaatctaacttctagtctagaaataatatcggtcttattcttaaaatctattcccttgatgaagggatcgttaatgaacaaatccttggcctttgattcggctgatctattatctccgttatagacgttacgttgactagtccaaagacttacaggaatagatgtatcgatgatgttgatactatgtgatatgtgagcaaagattgttctcttagtggcatcactatatgttccagtaatggcggaaaactttttagaaatgttatatataaaagaattttttcgtgttccaaacattagcagattagtatgaagataaacactcatattatcaggaacattatcaatttttacatacacatcagcatcttgaatagaaacgataccatcttctggaacctctacgatctcggcagactccggataaccagtcggtgggccatcactaacaataactagatcatccaacaatctactcacatatgcatctatataatctttttcatcttgtgagtaccctggatacgaaataaatttattatccgtatttccataataaggtttagtataaacagagagcgatgttgccgcatgaacttcagttacagtcgccgttggttggtttatttgacctattactctcctaggtttctctataaacgatggtttaatttgtacattcttaaccatatatccaataaagctcaattcaggaacataaacaaattctttgttgaacgtttcaaagtcgaacgaagagtcacgaataacgatatcggatactggattgaaggttaccgttacggtaatttttgaatcggatagtttaagactgctgaatgtatcttccacatcaaacggagttttaatataaacgtatactgtagatggttctttaatagtgtcattaggagttaggccaatagaaatatcattaagttcactagaatatccagagtgtttcaaagcaattgtattattgatacaattattatataattcttcgccctcaatttcccaaataacaccgttacacgaagagatagatacgtgattaatacatttatatccaacatatggtacgtaaccgaatcttcccatacctttaacttctggaagttccaaactcagaaccaaatgattaagcgcagtaatatactgatccctaatttcgaagctagcgatagcctgattgtctggaccatcgtttgtcataactccggatagagaaatatattgcggcatatataaagttggaatttgactatcgactgcgaagacattagaccgtttaatagagtcatccccaccgatcaaagaattaatgatagtattattcattttctatttaaaatggaaaaagcttacaataaactccgtagagaaatatctataatttgtgagttttccttaaagtaacagcttccgtaaacgccgtctttatctcttagtaagtttattgtatttataaccttttccttatcttcatagaatactaaaggcaacaaagaaatttttggttcttctctaagagctacgtgagacttaaccatagaagccaacgaatccctacatattttagaacagaaataccctacttcaccacccttgtatgtctcaatactaataggtctaaaaaccaaatcttgattacaaaaccaacacttatcaattacactatttgtcttaatagacacatctgccatagatttataatactttggtagtatacaagcgagtgcttcttctttagcgggcttaaagactgctttaggtgctgaaataaccacatctggaaggcttactcgcttagccatttaattacggaactatttttttatacttctaatgagcaagtagaaaacctctcatctacaaaaacgtactcgtgtccataatcctctaccatagtaacacgttttttagatctcatatgtgctaaaaagttttcccatactaattggttactattatttttcgtataatttttaacagtttgaggttttagatttttagttacagaagtgatatcgaatattttatccaaaaagaatgagtaattaattgtcttagaaggagtgttttcttggcaaaagaataccaagtgcttaaatatttctactacttcattaatcttttctgtactcagattcagtttctcatcttttacttgattgattatttcaaagactaacttataatcctttttatttattctctcgttagccttaagaaaactagatacaaaatttgcatctacatcatccgtggatatttgatttttttccatgatatccaagagttccgagataatttctccagaacattgatgagacaataatctccgcaatacatttctcaaatgaataagtttattagacacgtggaagtttgactttttttgtacctttgtacatttttgaaataccgactcgcaaaaaatacaatattcatatccttgttcagatactataccgttgtgtctacaaccgctacataatcgtagattcatgttaacactctacgtatctcgtcgtccaatattttatataaaaacattttatttctagacgttgccagaaaatcctgtaatatttttagttttttgggctgtgaataaagtatcgccctaatatggttaccgtcctccgccaatatagtagttaaattatccgcacatgcagaagaacaccgcttaggcggattcagtacaatgttatatttttcgtaccaactcatttaaatatcataatctaaaatagttctgtaatatgtctagcgctaatatattgatcataatcctgtgcataaattaagatacaacaatgtctcgaaatcatcgacatggcttcttccatagttagaagatcgtcgtcaaagttagcaacgtgattcatcaacatttgctgttttgaggcagcaaatactgaaccatcgccattcaaccattcataaaaaccatcgtctgaatccattgataatttcttgtactggtttttgagagctcgcatcaatctagcatttctagctcccggattgaaaacagaaagaggatcgtacatccagggtccattttctgtaaatagaatcgtataatgtcccttcaagaagatatcagacgatccacaatcaaagaattggtctccgagtttgtaacaaactgcggactttaacctatacatgataccgtttagcataatttctggtgatacgtcaatcggagtatcatctattagagatctaaagccggtgtaacattctccaccaaacatattcttattctgacgtcgttctacataaaacatcattgctccattaacgataacaggggaatgaacagcactacccatcacattagttcccaatggatcaatgtgtgtaactccagaacatcttccatatcctatgttaggaggagcgaacaccactcttccactattgccatcgaatgccatagaataaatatccttggaattgatagaaatcggactgtcggatgttgtgatcatcttcataggattaacaacgatgtatggtgccgcctgaagtttcatatcgtaactgatgccgtttataggtctagccacagaaaccaacgtaggtctaaatccaactatagacaaaatagaagccaatatctgttcctcatctgtcataacttgagagcatccagtatgaataatcttcattagatggggatctaccgcatcatcatcgttacaataaaaaattcccattctaatgttcataattgcttttctaatcatggtatgcatgtttgctctctgaatctctgtggaaattagatctgatacacctgtaatcactatcggattatcctccgtaagacgattaaccaacaacatataattataagactttacttttctaaattcataaagttgctggattaggctataggtgtctccatgtacatacgcgttctcgagcgcaggaagtttaataccgaatagtgccatcagaataggatgaatatagtaattagtttctggttttctataaataaaagacaaatcttgtgaactagacatatcggtaaaatgcatggattggaatcgtgtagtcgacagaagaatatgatgattagatggagagtatattttatctaactctttgagttggtcaccgattctaggactagctcgagaatgaataagtactaaaggatgagtacatttcacagaaacactagcattgttcaatgtgctctttacatgggtaaggagttgaaatagctcgtttctatttgttctgacaatatttagtttattcataatgttaagcatatcctgaatagtaaagttagatgtgtcatacttgttagtagttagatatttagcaattgcattcccatcatttctcaatctcgtactccaatcatgtgtagatgctacttcatctatagaaaccatacaatcctttttgataggctgttgagattgattatttcctgcacgtttaggtttggtacgttgatttctagcccctgcggatataaagtcatcgtctacaatttgggacaatgaattgcatacactacaagacaaagatttatcagaagtgtgaatatgatcttcatctaccaaagaaagagtttgattagtataactagattttagtcctgcgttagatgttaaaaaaacatcgctattgaccacggcttccattatttatattcgtagtttttactcgaaagcgtgattttaatatccaatcttattacttttggaatcgttcaaaacctttgactagttgtagaatttgatctattgccctacgcgtatactcccttgcatcatatacgttcgtcaccagatcgtttgtttcggcctgaagttggtgcatatctttttcaacactcgacatgagatccttaagggccatatcgtctagattttgttgagatgctgctcctggatttggattttgttgtgctgttgtacatactgtaccaccagtaggtgtaggagtacatacagtggccacaataggaggttgaggaggtgtaaccgttggagtagtacaagaaatatttccatccgattgttgtgtacatgtagttgttggtaacgtctgagaaggttgggtagatggcggcgtcgtcgttttttgatctttattaaatttagagataatatcctgaacagcattgctcggcgtcaacgctggaaggagtgaactcgccggcgcatcagtatcttcagacagccaatcaaaaagattagacatatcagatgatgtattagtttgttgtcgtggttttggtgtaggagcagtactactaggtagaagaataggagccggtgtagctgttggaaccggctgtggagttatatgaatagttggttgtagcggttggataggctgtctgctggcggccatcatattatctctagctagttgttctcgcaactgtctttgataatacgactcttgagactttagtcctatttcaatcgcttcatcctttttcgtatccggatccttttcttcagaataatagattgacgactttggtgtagaggattctgccagcccctgtgagaacttgttaaagaagtccatttaaggctttaaaattgaattgcgattataagattaaatggcagacacagacgatattatcgactatgaatccgatgatctcactgaatacgaggatgatgaagaagaggaagaagatggagagtcactagaaactagtgatatagatcccaaatcttcttataagattgtagaatcagcatccactcatatagaagatgcgcattccaatcttaaacatatagggaatcatatatctgctcttaaacgacgctatactagacgtataagtctatttgaaatagcgggtataatagcagaaagctataacttgcttcaacgaggaagattacctctagtttcagaattttctgacgaaacgatgaagcaaaatatgctacatgtaattatacaagagatagaggagggttcttgtcctatagtcatcgaaaagaacggagaattgttgtcggtaaacgattttgacaaagatggtctaaaattccatctagactatattatcaaaatttggaaacttcaaaaacgatattagaatttatacgaatatcgttctctaaatgtcacaatcaagtctcgcatgttcagcaatttattgtcgtactttatatcgtgttcattaacgatatcttgcaaaatagtaatgattctatcttccttcgatagatattcttcagagattattgtcttatattctttcttgttatcagatatgaatttgataagactttgaacattattgatacccgtctgtttaattttttctacagatattttagttttggcagattctatcgtatctgtcaatagacatccaacatcgacattcgacgtcaattgtctataaatcaacgtataaattttagaaataacattagcgaattgttgtgcattgatgtcgttattctgaaacagtatgattttaggtagcattttcttaacaaagagaacgtatttattgttactcagttgaacagatgatatatccagattactaacgcatctgattccgtataccaaactttcagaagaaatggtatacaattgtttgtattcattcaatgtctctttttcagaaattagtttagagtcgaatactgcaataattttcaagagatagttttcatcagataagattttatttagtgtagatatgataaaactattgttttgttggagaacttgatacgccgcgttctctgtagtcgacgctctcaaatgggaaacaatctccattatttttttggaatcggatacaatatcttcggtatcttgacgcagtctagtatacatagagttaagagagattagagtttgtacattaagcaacatgtctctaaatgtggctacaaacttttccttttccacatcatctagtttattatataccgatttcacaacggcaccagatttaaggaaccagaatgaaaaactctgataactacaatatttcatcatagttacgattttatcatcttctatagttggtgtgatagcgcatacctttttctccaagactggaaccaacgtcataaaaatgtttaaatcaaaatccatatcaacatctgatgcgctaagaccagtctcgcgttcaagattatctttactaatggtgacgaactcatcgtataaaactctaagtttgtccattatttatttacagatttagttgtttaatttatttgtgctcttccagagttgggatagtatttttctaacgtcggtattatattattaggatctacgttcatatgtatcataatattaatcatccacgttttgataaatctatctttagcttctgaaataacgtatttaaacaaaggagaaaaatatttagctacggcatcagacgcaataacattttttgtaaatgtaacatatttagacgacagatcttcgttaaaaagttttccatctatgtagaatccatcagttgttaacaccattcccgcgtcagattgaataggagtttgaatagtttgttttggaaatagatccttcaataacttatagttgggtgggaaaaaatcgattttatcactagactctttcttttttactatcattacctcatgaactatttcttgaatgagtatatgtattttctttcctatatcggacgcgttcattggaaaatataccatgtcgttaactataagaatatttttatcctcgtttacaaactgaataatatcagatgtagttcgtaaacgaactatatcatcaccagcacaacatctaactatatgatatccactagtttcctttagtcgtttattatcttgttccatattagcagtcattccatcatttaagaaggcgtcaaagataatagggagaaatgacattttggattctgttacaactttaccaaaattaaggatatacggacttactatctttttctcaacgtcaatttgatgaacacacgatgaaaatgtacttcgatgagattgatcatgtagaaaacaacaagggatacaatatttccgcatatcatgaaatatattaagaaatcccaccttattatatttccccaaaggatccatgcacgtaaacattatgccgttatcattaataaagacttctttctcatcggatctgtaaaagttgttactgatttttttcattccaggatctagataattaataatgatgggttttctattcttattctttgtattttggcatatcctagaccagtaaacagtttccactttggtaaaatcagcagacttttgaacgctattaaacatggcattaatggcaataactaaaaatgtaaaatatttttctatgttaggaatatggtttttcactttaatagatatatggtttttggccaaaatgatagatatttttttatccgaggatagtaaaatattattagtcgccgtctctataaaaatgaagctagtctcgatatccaattttattctagaattgataggagtcgccaaatgtaccttatacgttatatctcccttgatgcgttccatttgtgtatctatatcggacacaagatctgtaaatagttttacgttattaatcatcacggtatcgccgtcgctagataatgctaatgtaccatccaagtcccaaatggagagatttaactgttcatcgtttagaataaaatgattaccggtcatattaataaagtgttcatcgtatctagataacaacgacttataattaatgtccaagtcttgaactcgctgaatgatcttttttaacccagttagttttagattggtacgaaatatattgttaaactttgattctacagtaatgtccaaatctagttgtggaaatacttccatcaacattgtttcaaacttgataatattattatctacatcttcgtacgatccaaattccggaatagatgtatcgcacgctctgaccacccagataaccaaaaagtcacacgctccaggatatacattgtataaaaagctatcgttttttagtagtgtttttttctgagtatatacgaagggattaaaaatagtattatcaacgtaactatattccaaattattcttatgagaatagataataatatcgtccttaatatctaacaaatttcctaaatatccctttaattgagtcattcgaagcgtcaatagaatatgtctcttaactatttccggctgttgtatatttaaatgacttcgtaaaaaataatatatgggcgacttctcatctatgtaatcatatggagtgagatatagggctcgttctacctcctgccccttacccacctgtaataccaattgcggacttactatatatcgcatatttatatcgtggggtaaagtgaaaatctactaccgatgatgtaagtcttacaatgttcgaaccagtaccagatcttaatttggaggcctccgtagaactaggggaggtaaatatagatcaaacaacacctatgataaaggagaatagcggttttatatcccgcagtagacgtctattcgcccatagatctaaggatgatgagagaaaactagcactacgattctttttacaaagactttattttttagatcatagagagattcattatttgttcagatgcgttgacgctgtaaaagacgtcactattaccaaaaaaaataacattatcgtggcgccttatatagcacttttaactatcgcatcaaaaggatgcaaacttacagaaacaatgattgaagcattctttccagaactatataatgaacatagtaagaaatttaaattcaactctcaagtatccatcatccaagaaaaactcggataccagtttggaaactatcacgtttatgattttgaaccgtattactctacagtagctctggctattcgagatgaacattcatctggcatttttaatatccgtcaagagagttatctggtaagttcattatctgaaataacatatagattttatctaattaatctaaaatctgatcttgttcaatggagtgctagtacgggcgctgtaattaatcaaatggtaaatactgtattgattacagtgtatgaaaagttacaactggtcatagaaaatgattcacaatttacatgttcattggctgtggaatcagaacttccaataaaattacttaaagatagaaatgaattatttacaaaattcattaacgagttaaaaaagaccagttcattcaagataagcaaacgcgataaggatacgctattaaaatattttacttaggactggagttagaatttatagacgactcatttcgtttatcattattactaccatcattattagtattcttcttgtcatcttgttcagaaatatacagcaatgctatacctaatactaaatacattatcatgctcgcaatggctctaacaacaacgaaccaaaatgaatttggtcgtagcttttgttcacaaaaatacataaagaaatgtctacataaatctatggcgccattggctacttgaaatagcgccagtcctcctacagattttaatatagctgtataacatgacatttattcatcatcaaaagagacagagtcaccatctgtcatatttagattttttttcatgtgttcaaagtatcctctactcatttcattataatagtttatcatacttagaattttaggacggatcaatgagtaagacttgactagatcgtcagtagtaatttgtgcatcgtctattctgcatccgcttcgtcgaataatgtatagcatcgctttgagattctccatagctatcaagtctttatacaatgacatggaaatatctgtgaatactttatacttctccaacatcgatgccttaacatcatcgcctactttagcattgaaaatacgttctattgtgtagatggatgtagcaagatttttaaacaacaatgccattttacacgatgattgcctcaagtctccaatcgtttgtttagaacgattagctacagagttcaacgcttggctgactagcatattattatctttagaaattgtattcttcaatgaggcgtttatcatatctgtgatttcgttagtcatattacagtctgactgggttgtaatgttatccaacatatcacctatggatacggtacacgtaccagcatttgtaataatcctatctaagatgttgtatggcattgcgcagaaaatatcttctcctgtaatatctccactctcgataaatctactcagattattcttaaatgccttattctctggagaaaagatatcagtgtccatcatttcattaatagtatacgcagaaaagataccacgagtatcaattctatccaagatacttatcggttccgagtcacagataatggtttcctctccttcgggagatcctgcatagaaatatctaggacaatagtttctatactgtctgtaactctgataatctctaaagtcactaactgataccatgaaattgagaagatcaaacgctgaagtaattaatttttctgcctcgtttttactacaactagttttcatcaatgtagtgacgatgtattgtttagttactcttggtctaatactgatgatagagatattattacttcccataatggatcttctagtagtcaccttaaagcccattgatgcaaatagcagatagataaagtcttggtatgactcctttctaatatagtacggactacctttgtcacccaactttatacccacataagccataacaacctctttaatagccgtttcatgaggtttatcagccatgagcctgagtagttggaagaatctcatgaatcccgtctcagaaagtcctatatgcatgatagatttatctttcctgggaaactctcgtatagtcatagatgaaatactcttcaaagtttctgaaataagattagtaacagtcttacctccgactactctaggtaacaaacaaactctaataggtgttttctctgcggagataatatcagaaaggatagagcaataagtagtattattgtgattataaagaccgaatacataacaggtagaatttataaacatcatgtcctgaaggtttttagacttgtattcctcgtaatccataccgtcccaaaacatggatttggtaactttgatagccgtagatctttgttccttcgccaacaggttaaagaaattaataaagaatttgttgtttctatttatgtccacaaattgcacgtttggaagcgccacggttacattcactgcagcattttgaggatcgcgagtatgaagtacgatgttattgtttactggtatatctggaaagaaatctaccagtctaggaataagagattgatatcgcatagaaatacaaaagttcataatctcatcatcgaagagcattttgttaccattgtaataaatatccactctgtcatatgtataaatgaagtactgttcaaacatgatgagatgtttatatgttggcatagtagtgagatcgacgtttggtaatggcaatgtattaagattaactccataatgtctagcagcatctgcgatgttataagtgttgtcaaagcggggtcgatcttgtgctgttatatattgtctaacacctataagattatcaaaatcttgtctgcttaatacaccgttaacaatttttgccttgaattcttttattggtgcattaataacatccttatagaggatgttaaacaaataagtattatcaaagttaagatctgggtatttcttttctgctagaacatccattgagtcggagccatctggtttaatataaccaccgataaatctagctctgtattctgtatccgtcaatctaatattaagaaggtgttgagtgaaaggtggaagatcgtaaaagctgtgagtattaatgataggattagtttccgaactaatgttaattggggtattaataatatctatatttccagcgttaagtgtaacattaaacagttttaattcacgtgacgtggtatcaattaaataattaatgcccaatttggatatagcagcctgaagctcatcttgtttagttacggatcctaatgagttattaagcaatatatcgaacggatgaacgaaggttgttttgagtttgtcgcatactttgtaatctagacatagatgcggaagaacggtagaaactatacgaaataaatattcagagtcctctaattgatcaagagtaactattgacttaataggcatcatttatttagtattaaatgacgaccgtaccagtgacggatatacaaaacgatttaattacagagttttcagaagataattatccatctaacaaaaattatgaaataactcttcgtcaaatgtctattctaactcacgttaacaacgtggtagatagagaacataatgccgccgtagtgtcatctccagaggaaatatcctcacaacttaatgaagatctatttccagatgatgattctccggccactattatcgaaagagtacaacctcatactactattattgacgatactccacctcctacgtttcgtagagagttattgatatcggaacaacgtcaacaacgagaaaaaagatttaatattacagtatcgaaaaatgctgaagcaataatggaatctagatctatgatatcttctatgccaacacaaacaccatccttgggagtagtttatgataaagataaaagaattcagatgttggaggatgaagtggttaatcttagaaatcaacgatctaatacaaaatcatctgataatttagataattttaccagaatactatttggtaagactccgtataaatcaacagaagttaataagcgtatagccatcgttaattatgcaaatttgaacgggtctcccttatcagtcgaggacttggatgtttgttcagaggatgaaatagatagaatctataaaacgattaaacaatatcacgaaagtagaaaacgaaaaattatcgtcactaacgtgattattattgtcataaacattatcgagcaagcattgctaaaactcggatttgaagaaatcaaaggactgagtaccgatatcacttcagaaattatcgatgtggagatcggagatgactgcgatgctgtagcatctaaactaggaatcggtaacagtccggttcttaatattgtattgtttatactcaagatattcgttaaacgaattaaaattatttaatttaatacattcccatatccagacaacaatcgtctggattaatctgttcctgtcgtctcataccggacgacatattaatctttttattagtaggcatctttttagatggtttctttttcccagcattaactgagtcgatacctagaagatcgtgattgatctctccgaccattccacgaacttctaattggccgtctctgacggtaccataaactattttaccagcattagtaacagcttggacaatctgaccatccatcgcattgtacgatgtagtagtaactgttgttctacgtctaggagcaccagaagtatttttggagcccttggaggttgatgtagaagaagacgaggattttgattttggtttacatgtaatacattttgaactctttgattttgtatcacatgcgccggcagtcacatctgtttgagaattaagattattgttgcctcctttgacggctgcatctccaccgatttgcgctagtagatttttaagctgtggtgtaatcttattaactgtttcgatataatcatcgtaactgcttctaacggctaaattttttttatccgccatttagaagctaaaaatatttttatttatacagaagatttaactagattatacaatgaactaatatgatccttttccagattatttacaaacttggtattttttggttctggaggaggcgaatttaaattcggacttggattcggattttgtgagttcttgatcttattatacatcgagtataggatggcgacggtaactgctacgcaaataccgatcaacaaaagaataccaatcatttattgacaataacttcactattgatcaagtatgcaatatatcatcttttcactaaataagtagtaataatgattcaacaatgtcgagatatatggacgataataatttagttcatggaaatatcgctatgattggtatgaatgactccgctaactctgtggggtgcgcagtgctttccccacatagaataaattagcattccgactgtgataataataccaagtataaacgccataatactcaatactttccatgtacgagtgggactggtagacttactaaagtcaataaaggcgaagatacacgaaagaatcaaaagaatgattccagcgattagcacgccggaaaaataatttccaatcataagcatcatgtccatttaactaataaaaattttaaatcgccgaatgaacaaagtggaatataaaccatataaaaacaatagtttgtactgcaaaaataatatctatttttgttttcgaagatatggtaaaattaaatagtagtacacagcatgttataactaacagcagcaacggctcgtaattacttatcatttactagacgaaaaggtggtgggatattttcttgctcaaataatacgaatatatcacccatccattttatgcgatgtttatatactctaatctttaatagatctatagacgacgggtttaccaacaatatagattttatcgattcatctaatttaaacccttccttaaacgtgaatgatctattatctggcataacgatgactctacctgatgaatcggacaatgtactgggccatgtagaataaattatcaacgaattatcgtctacgaacatttatatcatttgttttaattttaggacgcgaataaatagatataaaatagaaaataacagatattacaaccaatgttatggccgcgcccaaccaggtaggcagttttattttatcttttactacaggttctcctggatgatgtacgtcaccaacggcggacgtagttctagtacaattagacgtaagttctgcttgggaattttttaacgctaaagagttaacgttaatcgtgcacccaacgtatttacatctagttctttgaacatcttgattataatataaccattttctatctctagattcgtcggtgcactcatgtaaccaacataccctaggtcctaaatatttatctccggaattagattttggataattcgcgcaccaacaatttctatttcctttatgatcgttacaaaagacgtataatgccgtatccccaaaagtaaaataatcaggacgaataattctaataaactcagaacaatatctcgcatccatatgtttggagcaaatatcggaataagtagacatagccggtttccgttttgcacgtaaccattctaaacaattggggtttccaggatcgtttctacaaaatccagtcatgaaatcgtcacaatgttctgtcttgtaattattattaaatatttttggacagtgtttggtatttgtcttagaacaacattttgctacgctatcactatcgcccaggagataatccttttttataaaatgacatcgttgcccggatgctatataatcagtagcgtgttttaaatccttaatatattcaggagttacctcgttctgataatagattaatgatccaggacgaaatttgaaagaactacatggttctccatgaattaatacatattgtttagcaaattcaggaactataaaactactacaatgatctatcgacataccatctatcaaacaaaatttgggtttaatttctcccggagatgtttcataatagtacgtataactttcttctgcaaacttaacagctctattatattcaggataattaaaacctaattccatatatttgtctcgtatatctgctattcctggtgctattttgattctattaagagtaacagctgcccccattcttaataatcgtcagtatttaaactgttaaatgttggtatatcaacatctaccttatttcccgcagtataaggtttgttgcaggtatactgttcaggaatggttacatttatacttcttctatagtcctgtctttcgatgttcatcacatatgcaaagaacagaataaacaaaataatgtaagaaataatattaaatatctgtgaattcgtaaatacattgattgccataataattacagcagctacaatacacacaatagacattcccacagtgttgccattacctccacgatacatttgagttactaagcaataggtaataactaagctagtaagaggcaatagaaaagatgagataaatatcatcaatatagagattagaggagggctatatagagccaagacgaacaaaatcaaaccgagtaacgttctaacatcattatttttgaagattcccaaataatcattcattcctccataatcgttttgcatcatacctccatctttaggcataaacgattgctgctgttcctctgtaaataaatctttatcaagcactccagcacccgcagagaagtcgtcaagcatattgtaatatcttaaataactcatttatatattaaaaaatgtcactattaaagatggagtataatctttatgccgaactaaaaaaaatgacttgtggtcaacccctaagtctttttaacgaagacggggatttcgtagaagttgaaccgggatcatcctttaagtttctgatacctaagggattttacgcctctccttccgtaaagacgagtctagtattcgagacattaacaacgaccgataataaaatcactagtatcaatccaacaaatgcgccaaagttatatcctcttcaacgcaaagtcgtatctgaagtagtttctaatatgaggaaaatgatcgaatcaaaacgtcctctatacattactcttcacttggcgtgtggatttggtaagactattaccacgtgttatcttatggctacacacggtagaaaaaccgtcatttgcgtacccaataaaatgttaatacatcaatggaagacacaggtagaggcagtcggattggaacataagatatccatagatggagtaagtagtctattaaaggaactaaagactcaaagtccggatgtattaatagtagtcagtagacatctgacaaacgatgccttttgtaaatatatcaataagcattatgatttgttcatcttggatgaatcacatacgtataatctgatgaacaatacagcagttacaagatttttagcgtattatcctccgatgatgtgttattttttaactgctacacctagaccagctaaccgaatttattgtaacagtattattaatattgccaagttatccgatctaaaaaaaactatctatgcggtagatagtttttttgagccatattccacagataatattagacatatgataaaacgattagatggaccatctaataaatatcatatatatactgagaagttattatctgtagacgagcctagaaatcaacttattcttgataccctggtagaagaattcaagtcaggaactattaatcgaattttagttattactaaactacgtgaacatatggtattcttctacaaacgattattagatcttttcggaccagaggttgtatttataggagacgcccaaaatagacgtactccagatatggtcaaatcaatcaaggaactaaatagatttatattcgtatccaccttattttattccggtactggtttagatattcctagtttggattcgttgttcatttgctcggcagtaatcaacaatatgcaaatagagcaattactagggagggtatgtcgagaaacagaactattagataggacggtatatgtatttcctagcacatccatcaaagaaataaagtacatgataggaaatttcatgcaacgaattattagtctgtctgtagataaactaggatttaaacaaaaaagttatcggaaacatcaagaatccgatcccacttctgtatgtacaacatcctccagagaagaacgtgtattaaatagaatatttaactcgcaaaatcgttaagaagtttaagcgacgatccgcatgctgcgcaggccagtgtattacccctcatagtattaatataatccaatgatacttttgtgatgtcggaaatcttaaccaatttagactgacaggcagaacacgtcatgcaatcatcatcgtcatcgataactgtagtcttgggcttctttttgcggctcttcattccggaacgcacattggtgctatccatttaggtagtaaaaaataagtcagaatatgccctatagcacgatcgtgcaaaacctggtatatcgtctctatctttatcacaatatagtgtatcgacatctttattattattgacttcgtttatcttggaacatggaatgggaacatttttgttatcaacggccacctttgccttaattccagatgttgtaaaattataactaaacagtctatcatcgacacaaatgaaattcttgtttagacgtttgtagtttacgtatgcggctcgttcgcgtctcattttttcagatattgcaggtactataatattaaaaataagaatgaaataacataggattaaaaataaagttatcatgacttctagcgctgatttaactaacttaaaagaattacttagtctgtacaaaagtttgagattttcagattctgcggctatagaaaagtataattctttggtagaatggggaacatctacttactggaaaataggcgtgcaaaaggtagctaatgtcgagacgtcaatatctgattattatgatgaggtaaaaaataaaccgtttaatattgatccgggctattacattttcttaccggtatattttgggagcgtctttatttattcgaagggtaaaaatatggtagaacttggatctggaaactcttttcaaataccagatgatatgcgaagtgcgtgtaacaaagtattagacagcgataacggaatagactttctgagatttgttttgttaaacaatagatggataatggaagatgctatatcaaaatatcagtctccagttaatatatttaaactagctagtgagtacggattaaacatacccaaatatttagaaattgaaatagaggaagacacattatttgacgacgagttatactctattatagaacgctcttttgatgataaatttccaaaaatatccatatcgtatattaagttgggagaacttagacggcaagttgtagactttttcaaattctcgttcatgtatattgagtccatcaaggtagatcgtataggagataatatttttattcctagcgttataacaaaatcaggaaaaaagatattagtaaaagatgtagaccatttaatacgatccaaggttagagaacatacatttgtaaaagtaaaaaagaaaaacacattttccattttatacgactatgatggaaacggaacagaaactagaggagaagtaataaaacgaattatagacactataggacgagactattatgttaacggaaagtatttctctaaggttggtagtgcaggcttaaagcaattgactaataaattagatattaatgagtgcgcaactgtcgatgagttagttgatgagattaataaatccggaactgtaaaacgaaaaataaaaaaccaatcagcatttgatttaagcagagaatgtttgggatatccagaagcggattttataacgttagttaataacatgcggttcaaaatagaaaattgtaaggttgtaaatttcaatattgaaaatactaattgtttaaataacccgagtattgaaactatatatagaaactttaaccagttcgtctcaatctttaatgtcgtcaccgatgtcaaaaaaagattattcgagtgaaataatatgcgcctttgatataggtgcaaaaaatcctgccagaactgttttagaagtcaaggataactccgttagggtattggatatatcaaaattagactggagttctgattgggaaaggcgcatagctaaagatttgtcacaatatgaatacactacagttcttctagaacgtcagcctagaaggtcgccgtatgttaaatttatctattttattaaaggctttttatatcatacatcggctgccaaagttatttgcgtctcgcctgtcatgtctggtaattcatatagagatcgaaaaaagagatcggtcgaagcatttcttgattggatggacacattcggattgcgagactccgttccggatagacgcaaattagacgatgtagcggatagtttcaatttggctatgagatacgtattagataaatggaatactaattatacaccttataataggtgtaaatctaggaattacataaaaaaaatgtaataacgttagtaacgccattatggataatctatttacctttctacatgaaatagaagatagatatgccagaactatttttaactttcatctaataagttgcgatgaaataggagatatatatggtcttatgaaagaacgaatttcctcagaggatatgtttgataatatagtgtataataaagatatacatcatgccattaagaaactagtgtattgcgacatccaacttactaaacacattattaatcagaatacgtatccggtatttaacgattcttcacaagtgaaatgttgtcattatttcgatataaactcagataatagcaatattagctctcgtacagtagagatatttgagagggaaaagtcatctcttgtatcatatattaaaactaccaataagaagagaaaggtcaattacggcgaaataaagaaaactgttcatggaggcactaatgcaaattacttttccggtaaaaagtctgatgagtatctgagtactacagttagatccaacattaatcaaccttggatcaaaaccatttctaagagaatgagagtagatatcattaatcactctatagtaacgcgtggaaaaagctctatattacaaactatagaaattatttttactaatagaacatgtgtgaaaatattcaaggattctactatgcacattattctatccaaggacaaggatgaaaaggggtgtatacacatgattgacaaattattctatgtctattataatttatttctgttgttcgaagatatcatccaaaacgagtactttaaagaagtagctaatgttgtaaaccacgtacttacggctacggcattagatgagaaattattcctaattaagaaaatggctgaacacgatgtttatggagttagcaatttcaaaatagggatgtttaacctgacatttattaagtcgttggatcataccgttttcccctctctgttagatgaggatagcaaaataaagttttttaaggggaaaaagctcaatattgtagcattacgatctctggaggattgtataaattacgtgactaaatccgagaatatgatagaaatgatgaaggaaagatcgactattttaaatagcatagatatagaaacggaatcggtagatcgtctaaaagaattgcttctaaaatgaaaaaaaacactgattcagaaatggatcaacgactcggatataagtttttggtgcctgatcctaaagccggagttttttatagaccgttacatttccaatatgtatcgtattctaattttatattgcatcgattgcatgaaatcttgaccgtcaagcggccactcttatcgtttaagaataatacagaacgaattatgatagaaattagcaatgttaaagtgactcctccagattactcacctataatcgcgagtattaaaggtaagagttatgacgcattagccacgttcactgtaaatatctttaaagaggtaatgaccaaagagggtatatccatcactaaaataagtagttatgagggaaaagattctcatttgataaaaattccgctactaataggatacgggaataaaaatccacttgatacagccaagtatcttgttcctaatgtcataggtggagtctttatcaataaacaatctgtcgaaaaagtaggaattaatctagtagaaaagattacaacatggccaaaatttagggttgttaagccaaactcattcactttctcgttttcctccgtatcccctcctaatgtattaccgacaagatatcgccattacaagatatctctggatatatcacaattggaagcgttgaatatatcatcgacaaagacatttataacggtcaatattgttttgctgtctcaatatttatctagagtgagtctagaattcattagacgtagcttatcatacgatatgcctccagaagttgtctatctagtaaacgcgataatagatagtgctaaacgaattactgaatctattactgactttaatattgatacatacattaatgacctggtggaagctgaacacattaaacaaaaatctcagttaacgatcaacgagttcaaatatgaaatgctgcataactttttacctcatatgaactatacacccgatcaactaaagggattttatatgatatctttactaagaaagtttctctactgtatctaccacacttctagatatccagatagagattcgatggtttgtcatcgtatactaacatacggcaaatattttgagacgttggcacatgatgaattagagaattacataggcaacatccgaaacgatatcatgaacaatcacaagaacagaggcacttacgcggtaaacattcatgtactaacaactcctggacttaatcatgcattttctagcttattgagtggaaagttcaaaaagtcagacggtagttatcgaacacatcctcactattcatggatgcagaatatttctattcctaggagtgttggattttatccggatcaagtaaagatttcaaagatgttttctgtcagaaaataccatccaagtcaatatctttacttttgttcatcagacgttccggaaagaggtcctcaggtaggtttagtatctcaattgtctgtcttgagttccattacaaatatactaacgtctgagtatttggatttggaaaagaaaatttgtgagtatatcagatcatattataaagatgatataagttactttgaaacaggatttccaatcactatagaaaatgctctagtcgcatctcttaatccaaatatgatatgtgattttgtaactgactttagacgtagaaaacggatgggattcttcggtaacttggaggtaggtattactttagttagggatcacatgaatgaaattcgcattaatattggagcgggaagattagtcagaccattcttggttgtggataacggagagctcatgatggatgtgtgtccggagttagaaagcagattagacgatatgacattctctgacattcagaaagagtttccacatgtcatcgaaatggtagatatagaacaatttacttttagtaacgtatgtgaatcggttcaaaaatttagaatgatgtcaaaggatgaaagaaagcaatacgatttatgtgactttcctgccgaatttagagatggatatgtggcatcttcattagtgggaatcaatcacaattctggacccagagctattcttggatgtgctcaagctaaacaagctatctcttgtctgagttcggatatacgaaataaaatagacaatggaattcatttgatgtatccagagaggccaatcgtgattagtaaggctttagaaacttcaaagattgcggctaattgcttcggccaacatgttactatagcattaatgtcgtacaaaggtatcaatcaagaggatggaattatcatcaaaaaacaatttattcagagaggcggtctcgatatagttaccgcaaagaaacatcaagtagaaattccgttggaaaactttaataacaaagaaagagataggtctaatgcatattcgaaattagaaagtaatggattagttagactgaatgctttcttggaatccggagacgctatggcacgaaatatctcatcaagaactcttgaagatgattttgctagagataatcagattagcttcgatgtttccgagaaatataccgatatgtacaaatctcgcgttgaacgagtacaagtagaacttactgacaaagttaaggtacgagtattaaccatgaaagaaagaagacccattctaggagacaaatttaccactagaacgagtcaaaagggaacagtcgcgtatgtcgcggatgaaacggaacttccatacgatgaaaatggtatcacaccagatgtcattattaattctacatccatcttctctagaaaaactatatctatgttgatagaggttattttaacagccgcatattctgctaagccgtacaacaataagggagaaaaccgacctgtctgttttcctagtagtaacgaaacatccatcgatacatatatgcaattcgctaaacaatgttatgagcattcaaatccgaaattgtctgatgaagaattatcggataaaatcttttgtgaaaagattctctatgatcctgaaacggataagccttatgcatccaaagtattttttggaccaatttattacttgcgtctgaggcatttaactcaggacaaggcaaccgttagatgtagaggtaaaaagacgaagctcattagacaagcgaatgagggacgaaaacgtggaggaggtattaagtttggagaaatggagagagactgtttaatagcgcatggcgcagccaatactattacagaagttttgaaagattcggaagaagattatcaagatgtgtatgtttgtgaaaattgtggagacatagcagcacaaatcaagggtattaatacatgtcttagatgttcaaaacttaatctctctcctctcttaacaaaaattgataccacgcacgtatctaaagtatttcttactcaaatgaacgccagaggcgtaaaagtcaaattagatttcgaacgaaggcctccttcgttttataaaccattagataaagttgatctcaagccgtcttttctggtgtaatattctagtttggtagtagatacatatcaatatcatcaaattcgagatccgaattataaaatgggcgtggattgttaactatagaatcggacgtctgatattcgaaaatctgtggagtttcaggttttggtggaggtgtaactgctacttgggatactgaagtctgatattcagaaagctgggggatgttctggttcgacatccaccgatggtgtcacatcactaatcggttcggtaacgtctgtggatggaggtgctacttctacagaacctgtagcctcagttgtcaacggagatacatttttaatgcgaggaaatgtataatttggtaatggtttctcatgtggatctgaagaagaggtaagatatctactagaaagataccgatcacgttctagttctcttttgtagaacttaactttttctttctcagcatctagttgatattccaacctcttcacgttactacgttcagatttcaattcacgttcgcatgggttacctccgcagtttttacgagcgatttcacgttcagccttcatgcgtctctgtgatccgtttacgttaaaccataaatacatgggtgatcctataaacatgaatttatttctaattctcagagctatagttaattgaccgtgtaatatttgcttacatgcatacttgatacgctcattaataagatttttatcattgctcgttatctcagaatcgtatatataaggagtaccatcgtgattcttaccagatattatacaaaatactatatataaaatatattgaccaacgttagtaatcatataaatgtttaacgttttaaattttgtattcaatgatccattatcatacgctagcatggtcttatgatattcattctttaaaatataatattgtgttagccattgcattggagctcctaatggagattttctattctcgtccattttaggatatgctttcataaagtccctaataacttcgtgaataatgtttctatgttttctactgatgcatgtatttgcttcgatttttttatcccatgtttcatctatcatagatttaaacgcagtaatgctcgcaacattaacatcttgaaccgttggtacaattccgttccataaatttataatgttcgccatttatataactcattttttgaatatacttttaattaacaaaagagttaagttactcatatggacgccgtccagtctgaacatcaatctttttagccagagatatcatagccgctcttagagtttcagcgtgattttccaacctaaatagaacttcatcgttgcgtttacaacacttttctatttgttcaaactttgttgttacattagtaatctttttttccaaattagttagccgttgtttgagagtttcctcattgtcgtcttcatcggctttaacaattgcttcgcgtttagcctctggctttttatcagcctttgtagaaaaaaattcagttgctggaattgcaagatcgtcatctccggggaaaagagttccgtccatttaaagtacagattttagaaactgacactctgcgttatttatatttggtacaacacatggattataaatattgatgttaataacatcagaaaatgtaaagtctatacattgttgcatcgtgttaaattttctaatggatctagtattattgggtccaacttctgcctgaaatccaaatatggaagcggatacaaaaccgtttcctggataaaccacacatctccacttttgctttacatcagaaattgtgtcgttgacatcttgaactctcctatctaatgccggtgttccacctatagattttgaatattcgaatgctgcatgagtagcattaaattccttaatattgccataattttcatatattgagtaaccctggataaaaagtaaacacaccgcagccgtcgctaccacaataaaaaaaattgatagagagttcatttataatctattagaagctgacaaaatttttttacacgcatcagacaatgctttaataaatagttcaacatctacttttgtcatatcgaaccgatggtatgattctaacctagaattacatccgaaaaagttgactatgttcatagtcattaagtcattaacaaacaacattccagactctggattataagacgatactgtttcgtcacaatcacctaccttaatcatgtgattatgaatattggctattagagcaccttctaagaaatctataatatctttgaaacacgatttaaaatcaaaccacgaatatacttctacgaagaaagttagtttacccataggagagataactataaatggagatctaaatacaaaatccggatctatgatagttttaacattattatattctctattaaatacctccacatctaaaaatgttaattttgaaactatgtcttcgtttattaccgtacctgaactaaacgctataagctctattgtttgagaactctttaaacgatattcttgaaatacatgtaacaaagtttcctttaactcggtcggtttatctaccatagttacagaatttgtatccttatctataatataataatcaaaatcgtataaagttatataattatcgcgttcagattgggatcttttcaaatagactaaaaaccccatttctctagtaagtatcttatgtatatgtttgtaaaatatcttcatggtgggaatatgctctaccgcagttagccattcctcattgacagcggtagatgtattagacaaaactattccaatgtttaacaagggccattttacgagattattaaatccttgtttgataaatgtagccaatgagggttcgagttcaacgacgattgaattctcttcccgcggatgctgcatgatgaacgacgggatgttgttcgattgatttggaattctttttcgactttttgtttatattaaatattttaaaatttatagctgatagcaattcatgtaccacggataatgtagacgcgtattgcgcatcgatatctttattattagataaatttatcaataaatgtgagaagtttgcctcgttaaggtcttccatttaaatattatataaacatttgtgtttgtatcttattcgtcttttatggaatagttttttactagtaaagctgcaattacacactttgtccgtaaaacataaatataaacaccagcttttatcaatcgttccaaaaagtcgacggcggacatttttaacatggcatctattttaaatacacttaggtttttggaaaaaacatcattttataattgtaacgattcaataactaaagaaaagattaagattaaacataagggaatgtcatttgtattttataagccaaagcattctaccgttgttaaatacttgtctggaggaggtatatatcatgatgatttggttgtattggggaaggtaacaattaatgatctaaagatgatgctattttacatggatttatcatatcatggagtgacaagtagtggagtaatttacaaattgggatcgtctatcgatagactttctctaaataggactattgttacaaaagttaataattatgatgatacattttttgacgacgatgattgatcgctattgcacaattttgtttttttactttctaatatagcgtttagattctttttcatgtgcgaatattgatttactaaaatatcgatgtttaacttttgttctatgacgtccttatcggcggtatcggtacatatacgtaattcaccttcacaaaatacggagtcttcgataataatagccaatcgattattggatctagctgtctgtatcatattcaacatgtttaatatatcctttcgtttcccctttacaggcatcgatcgtagcatattttccgcgtctgagatggaaatgttaaaactacaaaaatgcgtaatgttagcccgtcctaatattggtacgtgtctataagtttggcatagtagaataatagacgtgtttaaatgccttccaaagtttaagaattctattagagtattgcattttgatagtttatcgcctacatcatcaaaaataagtaaaaagtgtgctgattttttatgattttgtgcgacagcaatacatttttctatgttacttttagttcgtatcagattatattctagagattcctgactactaacgaaattaatatgatttggccaaatgtatccatcataatctgggttataaacgggtgtaaacaagaatatatgtttatattttttaactagtgtagaaaacagagatagtaaatagatagtttttccagatccagatcctcccgttaaaaccattctaaacggcatttttaataaattttctcttgaaaattgtttttcttggaaacaattcataattatatttacagttactaaattaatttgataataaatcaaaatatggaaaactaaggtcgttagtagggaggagaacaaagaaggcatatcgtgatataaataacatttattatcatgatgacaccagaaaacgacgaagagcagacatctgtgttctccgctactgtttacggagacaaaattcaaggaaagaataaacgcaaacgcgtgattggtctatgtattagaatatctatggttatttcactactatctatgattaccatgtccgcgtttctcatagtgcgcctaaatcaatgcatgtctgctaacgaggctgctattactgacgccgctgttgccgttgctgctgcatcatctactcatagaaaggttgcgtctagcactacgcaatatgatcacaaagaaagctgtaatggtttatattaccagggttcttgttatatattacattcagactaccagttattctcggatgctaaagcaaattgcactgcggaatcatcaacactacccaataaatccgatgtcttgattacctggctcattgattatgttgaggatacatggggatctgatggtaatccaattacaaaaactacatccgattatcaagattctgatgtatcacaagaagttagaaagtatttttgtgttaaaacaatgaactaatatttatttttgtacattaataaatgaaatcgcttaatagacaaactgtaagtatgtttaagaagttgtcggtgccggccgctataatgatgatactctcaaccattattagtggcataggaacatttctgcattacaaagaagaactgatgcctagtgcttgcgccaatggatggatacaatacgataaacattgttatctagataccaacattaaaatgtccacagataatgcggtttatcagtgtcgtaaattacgagctagattgcctagacctgatactagacatctgagagtattgtttagtattttttataaagattattgggtaagtttaaaaaagaccaataataaatggttagatattaataatgataaagatatagatattagtaaattaacaaattttaaacaactaaacagtacgacggatgctgaagcgtgttatatatacaagtctggaaaactggttaaaacagtatgtaaaagtactcaatctgtactatgtgttaaaaaattctacaagtgacaacaaaaaatgaattaataataagtcgttaacgtacgccgccatggacgccgcgtttgttattactccaatgggtgtgttgactataacagatacattgtatgatgatctcgatatttcaatcatggactttataggaccatacattataggtaacataaaaactgtccaaatagatgtacgggatataaaatattccgacatgcaaaaatgctactttagctataagggtaaaatagttcctcaggattctaatgatttggctagattcaacatttatagcatttgtgccgcatacagatcaaaaaataccatcatcatagcatgcgactatgatatcatgttagatatagaagataaacatcagccattttatctattcccatctattgatgtttttaacgctacaatcatagaagcgtataacctgtatacagctggagattatcatctaatcatcaatccttcagataatctgaaaatgaaattgtcgtttaattcttcattctgcatatcagacggcaatggatggattataattgatgggaaatgcaatagtaattttttatcataaaagttgtaaagtaaataataaaacaataaatattgaactagtagtacgtatattgagcaatcagaaatgatgctggtacctcttatcacggtgacagtagttgcgggaacaatattagtatgttatatattatatatttgtaggaaaaagatacgtactgtctataatgacaataaaattatcatgacaaaattaaaaaagataaagagttctaattccagcaaatctagtaaatcaactgatagcgaatcagactgggaggatcactgtagtgctatggaacaaaacaatgacgtagataatatttctaggaatgagatattggacgatgatagcttcgctggtagtttaatatgggataacgaatccaatgttatggcgcctagcacagaacacatttacgatagtgttgctggaagcacgctgctaataaataatgatcgtaatgaacagactatttatcagaacactacagtagtaattaatgaaacggagactgttgaagtacttaatgaagataccaaacagaatcctaactattcatccaatcctttcgtaaattataataaaaccagtatttgtagcaagtcaaatccgtttattacagaacttaacaataaatttagtgagaataatccgtttagacgagcacatagcgatgattatcttaataagcaagaacaagatcatgaacacgatgatatagaatcatcggtcgtatcattggtgtgattagtttcctttttataaaattgaagtaatatttagtattattgctgccgtcacgttgtacaaatggagatattccctgtattcggcatttctaaaattagcaattttattgctaataatgactgtagatattatatagatacagaacatcaaaaaattatatctgatgagatcaatagacagatggatgaaacggtacttcttaccaacatcttaagcgtagaagttgtaaatgacaatgagatgtaccatcttattccccatagactatcgactattatactctgtattagttctgtcggaggatgtgttatctctatagataatgacgtcaatggcaaaaatattctaacctttcccattgatcatgctgtaatcatatccccactgagtaaatgtgtcgtagttagcaagggtcctacaaccatattggttgttaaagcggatatacctagcaaacgattggtaacatcgtttacaaacgacatactgtatgtaaacaatctatcactgattaattatttgccgttgtctgtattcattattagacgagttaccgactatttggatagacacatatgcgatcagatatttgcgaataataagtggtattccattataaccatcgacaataagcagtttcctattccatcaaactgtataggtatgtcctctgccaagtacataaattctagcatcgagcaagatactttaatacatgtttgtaacctcgagcatccattcgacttagtatacaaaaaaatgcagtcgtacaattctgtacctatcaaggaacaaatattgtacggtagaattgataatataaatatgagcattagtatttctgtgtattaatagatttctagtatggggatcattaatcatctctaatctctaaatacctcataaaacgaaaaaaaagctattatcaaatactgtacggaatggattcattctcttctctttttatgaaactctgttgtatatctactgataaaactggaagcaaaaaatctgatagaaagaataagaataagatcaagatcaaggattatatggaacacgattattataaaataacaatagttcctggttcctcttccacgtctactagctcgtggtattatacacatgcctagtaatagtctctttgcgttgacggaaagcagactagaaataacaggctaaaatgttcagacaccataatagttcccaacccagataataacagagtaccatcaacacattcctttaaactcaatcccaaacccaaaaccgttaaaatgtatccggccaattgatagtagataatgaggtgtacagcgcatgataatttacacagtaaccaaaatgaaaatactttagtaattataagaaatatagatggtaacgtcatcatcaacaatccaataatatgccggagagtaaacattgacggataaaacaaaaatgctccgcataactctatcatggcaataacacaaccaaatacttgtaagattcctaaattagtagaaaatacaacggatatcgatgtataagtgatctcgagaaataataagaataaagtaatgcccgtaaagataaacatcaacattgtttggtaatcattaaaccaattagtatgaagttgaactaatttcacagtagattttattccagtgttatcctcgcatgtataagtacctggtaagatatctttatattctataatcaatgagacatcactatccgataacgaatgaagtctagcactagtatgccatttacttaatattgtcgtcttggaagttttattataagttaaaatatcatggttatccaatttccatctaatatactttgtcggattatctatagtacacggaataatgatggtatcattacatgctgtatactctatggtctttgtagttgttataacaaccaacgtatagaggtatatcaacgatattctaactcttgacattttttatttatttaaaatgatacctttgttatttattttattctattttgctaacggtattgaatggcataagtttgaaacgagtgaagaaataatttctacttacttattagacgacgtattatacacgggtgttaatggggcggtatacacattttcaaataataaactaaacaaaactggtttaactaataataattatatcacaacatctataaaagtagaggatgcggataaggatacattagtatgcggaaccaataacggaaatcccaaatgttggaaaatagacggttcagacgacccaaaacatagaggtagaggatacgctccttatcaaaatagcaaagtaacgataatcagttacaacgaatgtgtactatctgacataaacatatcaaaagaaggaattaaacgatggagaagatttgacggaccatgtggttatgatttatacacggcggataacgtaattccaaaagatggtttacgaggagcattcgtcgataaagatggtacttatgacaaagtttacattcttttcactgatactatcggctcaaagagaattgtcaaaattccgtatatagcacaaatgtgcctaaacgacgaaggtggtccatcatcattgtctagtcatagatggtcgacgtttctcaaagtcgaattagaatgtgatatcgacggaagaagttatagacaaattattcattctagaactataaaaacagataatgatacgatactatatgtattcttcgatagtccttattccaagtccgcattatgtacctattctatgaataccattaaacaatctttttctacgtcaaaattggaaggatatacaaagcaattgccgtctccagctcctggtatatgtttaccagctggaaaagttgtttcacataccacgtttgaagtcatagaaaaatataatgtactagatgatattataaagcctttatctaaccaacctatcttcgaaggaccgtctggtgttaaatggttcgatataaaggagaaggaaaatgaacatcgggaatatagaatatacttcataaaagaaaattctatatattcgttcgatacaaaatctaaacaaactcgtagctcgcaagtcgatgcgcgactattttcagtaatggtaacttcgaaaccgttatttatagcagatatagggataggagtaggaatgccacaaatgaaaaaaatacttaaaatgtaatcttaatcgagtacaccacacgacaatgaacaaacctaagacagattatgctggttatgcttgctgcgtaatatgcggtctaattgtcggaattatttttacagcgacactattaaaagttgtagaacgtaaattagttcatacaccatcaatagataaaacgataaaagatgcatatattagagaagattgtcctactgactggataagctataataataaatgtatccatttatctactgatcgaaaaacctgggaggaaggacgtaatacatgcaaagctctaaatccaaattcggatctaattaagatagagactccaaacgagttaagttttttaagaagccttagacgaggctattgggtaggagaatccgaaatattaaaccagacaaccccatataattttatagctaaaaatgccacgaagaatggaaatatatttgtagcacaacgaatactcccaaactgcattcgtgttacactatataacaattacactacatttttatcataccactacttcggttagatgttttagaaaaaaataaatatcgccgtaccgttcttgtttttataaaaataacaattaacaattatcaaattttttctttaatattttacgtggttgaccattcttggtggtaaaataatctcttagtgttggaatggaatgctgtttaatgtttccgcactcatcgtatattttgacgtatgcagtcacatcgtttacgcaatagtcagactgtagttctatcatgcttcctacatcagaaggaggaacagttttaaagtctcttggttttaatctattgccattagttttcatgaaatcctttgttttatccacttcacattttaaataaatgtccactatacattcttctgttaattttactagatcgtcatgggtcatagaatttataggttccgtagtccatggatccaaactagcaaacttcgcgtatacggtatcgcgattagtgtatacaccaactgtatgaaaattaagaaaacagtttaatagatcaacagaaatatttaatcctccgtttgatacagatgcgccatatttatggatttcggattcacacgttgtttgtctgaggggttcgtctagcgttgcttctacgtaaacttcgattcccatatattctttattgtcagaatcgcataccgatttatcatcatacactgtttgaaaactaaatggtatacacatcaaaataataaataataacgagtacattctgcaatattgttatcgtaattggaaaaatagtgttcgagtgagttggattatgtgagtattggattgtatattttattttatattttatattttatattttgtaataagaataaaatgctaatgtcaagtttattccaatagatgtcttattaaaaaacatatataataaataacaatggctgaatggcataaaattatcgaggatatctcaaaaaataataagttcgaggatgccgccatcgttgattacaagactacaaagaatgttctagctgctattcctaacagaacatttgccaagattaatccgggtgaaattattcctctcatcactaatcgtaatattctaaaacctcttattggtcagaaatattgtattgtatatactaactctctaatggatgagaacacgtatgctatggagttgcttactgggtacgcccctgtatctccgatcgttatagcgagaactcataccgcacttatatttttgatgggtaagccaacaacatccagacgtgacgtgtatagaacgtgtagagatcacgctacccgtgtacgtgcaactggtaattaaaataaaaagtaatattcatatgtagtgtcaattttaaatgatgatgatgaaatggataatatccatattgacgatgtcaataatgccggtattggcatacagctcatcgatttttagatttcattcagaggatgtggaattatgttatgggcatttgtattttgataggatctataatgtagtaaatataaaatataatccgcatattccatatagatataattttattaatcgcacgttaaccgtagatgaactagacgataatgtcttttttacacatggttattttttaaaacacaaatatggttcacttaatcctagtttgattgtctcattatcaggaaacttaaaatataatgatatacaatgctcagtaaatgtatcgtgtctcattaaaaatttggcaacgagtacatctactatattaacatctaaacataagacttattctctacatcggtccacgtgtattactataataggatacgattctattatatggtataaagatataaatgacaagtataatgacatctatgattttactgcaatatgtatgctaatagcgtctacattgatagtgaccatatacgtgtttaaaaaaataaaaatgaactcttaattatgctatgctattagaaatggataaaatcaaaattacggttgattcaaaaattggtaatgttgttaccatatcgtataacttggaaaagataactattgatgttacaccaaaaaagaaaaggatgtattattagcgcaatcagttgctgtcgaagaggcaaaagatgtcaaggtagaagaaaaaaatattatcgatattgaagatgacgatgatatggatgtagaaagcgcgtaatactatctataaacataagtatataataaatactttttatttacggtactcttgtagtggtgataccctactcgattatttttttaaaaaaaaaatacttattctgattcttctaaccatttccgtgttcgtttgaatgccacatcgacgtcaaagataggggagtagttgaaatctagttctgcattgttggtacgcacctcaaatgtagtgttggatatcttcaacgtatagttgttgagtagtgatggttttctaaatagaattctcttcatatcattcttgcacgcgtacatttttagcatccatcttggaatcctagatccttgttctattcccaatggtttcatcaatagaagattaaacatatcgtacgaacacgatggagagtaatcgtagcaaaagtaagcatttcctttaatcttagatcccggatactggatatattttgcagccaacacgtgcatccatgcagcatttcctacatatacccggctatgtaccgcgttatcatcgactgtacgatacataatgttaccgtgttgcttacattgctcgtaaaagactttcgtcaatttgtctccttctccgtaaattccagtgggtcttaggcaacaagtatacaattttgctccattcatgattacggaattattggctttcataaccagttgctcggccatacgtttactttttgcgtatacatgtcctggtgatatatcataaagggtatgctcatggccgatgaatggatcaccgtgtttattgggtcctattgcttccatgctactagtatagatcaaatacttgattcctaggtccacacaagctgccaatatagtctgtgttccataatagtttactttcatgatttcattatcggtgtattttccaaatacatccactagagcagccgtatgaataatcagatttaccccatctagcgcttctctcaccttatcaaagtcgtttatatcacattgtatatagtttataaccttaactttcgaggttattggttgtggatcttctacaatatctatgactctgatttcttgaacatcatctgcactaattaacagttttactatatacctgcctagaaatccggcaccaccagtaaccgcgtacacggccattgctgccactcataatatcagactacttattctattttactaaataatggctgtttgtataatagaccacgataatatcagaggagttatttactttgaaccagtccatggaaaagataaagttttaggatcagttattggattaaaatccggaacgtatagtttgataattcatcgttacggagatattagtcaaggatgtgattccataggcagtccagaaatatttatcggtaacatctttgtaaacagatatggtgtagcatatgtttatttagatacagatgtaaatatatttacaattattggaaaggcgttatctatttcaaaaaatgatcagagattagcgtgtgaagttattggtatttcttacataaatgaaaagataatacattttcttacaattaacgagaatggcgtttgatatatcagttaatgcgtctaaaacaataaatgcattagtttacttttctactcagcaaaataaattagtcatacgtaatgaagttaatgatacacactacactgtcgaatttgatagggacaaagtagttgacacgtttatttcatataatagacataatgacaccatagagataagaggggtgcttccagaggaaactaatattggttgcgcggttaatacgccggttagtatgacttacttgtataataagtatagttttaaactgattttagcagaatatataagacacagaaatactatatccggcaatatttattcggcattgatgacactagatgatttggctattaaacagtatggagacattgatctattatttaatgagaaacttaaagtagactccgattcgggactatttgactttgtcaactttgtaaaggatatgatatgttgtgattctagaatagtagtagctctatctagtctagtatctaaacattgggaattgacaaataaaaagtataggtgtatggcattagccgaacatatatctgatagtattccaatatctgagctatctagactacgatacaatctatgtaagtatctacgcgggcacactgagagcatagaggatgaatttgattattttgaagacgatgattcgtctacatgttctgccgtaaccgacagggaaacggatgtataattttttttatagcgtgaaggatatgataaaaaatataattgttgtatttatcccattccaatcaccttatatgattctgtaaaaaaattatactgtaacacaataaaggagtcttatagatgtatagaggtcagatactggtttgataaactgtttattccacataagtatgtttgactttatggttagacccgcatactttaacaaatcactgaaaattggagttaggtattgacctctcagaatcagttgccgttctggaacattaaatgtattttttatgatatactccaacgcatttatgtgggcatacaacaagtcattactaatggagtattccaagagttttagttgtctagtatttaacaagagaagagatttcaacagactgtttatgaactcgaatgccgcctcattgtcgcttatattgatgatgtcgaattctcccaatatcatcaccgatgagtagctcatcttgttatcgggatccaagttttctaaagatgtcattaaaccctcgatcatgaatggatttatcatcatcgtttttatgttggacatgagcttagtccgtttgtccacatctatagacgacgatttctgaattatttcatatatccctctctttaactccaggaacttgtcaggatggtctactttaatatgttctcgtctaagagatgaaaatctttggatggttgcacgcgacttttctctaaaggatgacgttgcccaagatcctctcttaaatgaatccatcttatccttggacaagatggacagtctattttccttagatggtttaatatttttgttacccatgatctataaaggtagacctaatcgtctcggatgaccatatatttattttcagttttattatacgcataaattgtaaaaaatatgttaggtttacgaaaatgtctcgtggggcattaatcgtttttgaaggattggacaaatctggaaaaacaacacaatgtatgaacatcatggaatctataccggcaaacacgataaaatatcttaactttcctcagagatccactgtcactggaaagatgatagatgactatctaactcgtaaaaaaacctataatgatcatatagttaatctattattttgtgcaaatagatgggagtttgcatcttttatacaagaacaactagaacagggaattactttaatagttgatagatacgcattttctggagtagcgtatgccgccgctaaaggcgcgtcaatgactctcagtaagagttatgaatctggattgcctaaacccgacttagttatattcttggaatctggtagcaaagaaattaatagaaacgtcggcgaggaaatttatgaagatgttacattccaacaaaaggtattacaagaatataaaaaaatgattgaagaaggagatattcattggcaaattatttcttctgaattcgaggaagatgtaaagaaggagttgattaagaatatagttatagaggctatacacacggttactggaccagtggggcaactgtggatgtaatagtgaaattacattttttataaatagatgttagtacagtgttataaatggatgaagcatattactctggcaacttggaatcagtactcggatacgtgtccgatatgcataccgaactcgcatcaatatctcaattagttattgccaagatagaaactatagataatgatatattaaacaaggacattgtaaattttatcatgtgtagatcaaacttggataatccatttatctctttcctagatactgtatatactattatagatcaagagaactatcagactgagttgattaattcattagacgacaatgaaattatcgattgtatagttaataagtttatgagcttttataaggataacctagaaaatatagtagatgctatcatcactctaaaatatataatgaataatccagattttaaaactacgtatgccgaagtactcggttccagaatagccgatatagatattaaacaagtgatacgtaagaatatactacaattgtctaatgatatccgcgaacgatatttgtgaaaaatattaaaaaaaaatactttttttattaaatgacgtcgcttcgcgaatttagaaaattatgctgtgatatatatcacgcatcaggatataaagaaaaatctaaattaattagagactttataacagatagggatgataaatatttgatcattaagctattgcttcccggattagacgatagaatttataacatgaacgataaacaaattataaaattatatagtataatatttaaacaatctcaggaagatatgctacaagatttaggatacggatatataggagacactattaggactttcttcaaagaaaacacagaaatccgtccaagagataaaagcattttaactttagaagacgtggatagtttcttaactacgttatcatccgtaactaaagaatcgcatcaaataaaattattgactgatatcgcatccgtttgtacatgtaatgatttaaaatgtgtagtcatgcttattgataaagatctaaaaattaaagcgggtcctcggtacgtacttaacgctattagtcctaatgcctatgatgtgtttagaaaatctaataacttgaaagagataatagaaaattcatctaaacaaaatctagactctatatctatttctgttatgactccaattaatcccatgttagcggaatcgtgtgattctgtcaataaggcgtttaaaaaatttccatcaggaatgtttgcggaagtcaaatacgatggtgaaagagtacaagttcataaaaataataacgagtttgccttctttagtagaaacatgaaaccagtactctctcataaagtggattatctcaaagaatacataccgaaagcatttaaaaaagctacgtctatcgtattggattctgaaattgttcttgtagacgaacataatgtaccgctcccgtttggaagtttaggtatacacaaaaagaaagaatataaaaactctaacatgtgtttgttcgtgtttgactgtttgtactttgatggattcgatatgacggacattccattgtacgaacgaagatcttttctcaaagatgttatggttgaaatacccaatagaatagtattctcagagttgacgaatattagtaacgagtctcagttaactgacgtattggatgatgcactaacgagaaaattagaaggattggtcttaaaagatattaatggagtatacgaaccgggaaagagaagatggttaaaaataaagcgagactatttgaacgagggttccatggcagattctgccgatttagtagtactaggtgcctactatggtaaaggagcaaagggtggtatcatggcagtctttctaatgggttgttacgacgatgaatccggtaaatggaagacggtaactaaatgttccggtcacgatgataatacgttaagggttttgcaagaccaattaacgatgattaaaattaacaaggatcccaaaaaaattccagagtggttagtagttaataaaatctatattcccgattttgtagtagaggatccgaaacaatctcagatatgggaaatttcaggagcagagtttacatcttccaagtcccataccgcaaatggaatatccattagatttcctagatttactaggataagagaggataaaacgtggaaagaatctactcatctaaacgatttagtaaacttgactaaatcttaatagttacatacaaactgaaaattaaaataacaccatttagttggtggtcgccatggatggtgttattgtatactgtctaaacgcgttagtaaaacatggcgaggaaataaatcatataaaaaatgatttcatgattaaaccatgttgtgaaagagtttgtgaaaaagttaagaacgttcacattggcggacaatctaaaaacaatacagtgattgcagatttgccatatatggataatgctgtatcggatgtatgcaattcactgtataaaaagaatgtatcaagaatatccagatttgctaatttgataaagatagatgacgatgacaagactcctactggtgtatataattattttaaacctaaagatgttattcctgttatcatatctataggaaaggataaagatgtctgtgaactattaatctcatcagacatatcgtgtgcatgcgtggagttaaattcatataaagtagccattcttcccatggatgtttccttttttaccaaaggaaatgcatcattgattattctcctgtttgatttctctatcgatgcagcacctctcttaagaagtgtaaccgataataatgttattatatctagacaccagcgtctacatgacgagcttccgagttccaattggttcaagttttacataagtataaagtccgactattgttctatattatatatggttgttgatggatctgtgatgcatgcgatagctgataatagaactcacgcaattattagcaaaaatatattagacaatactacgattaacgatgagtgtagatgctgttattttgaaccacagattaggattcttgatagagatgagatgctcaatggatcatcgtgtgatatgaacagacattgtattatgatgaatttacctgatgtaggcgaatttggatctagtatgttggggaaatatgaacctgacatgattaagattgctctttcggtggctggtaatttaataagaaatcgagactacattcccgggagacgaggatatagctactacgtttacggtatagcctctagataatttttttaagcacgaaataaaaaacataattttaaaccaatctatttcatactattttgtgtgatcaccatggacataaagatagatattagtatttctggtgataaatttacggtgactactaggagggaaaatgaagaaagaaaaaaatatctacctctccaaaaagaaaaaactactgatgttatcaaacctgattatcttgagtacgatgacttgttagatagagatgagatgtctactattctagaggaatattttatgtacagaggtctattaggcctcagaataaaatatggacgactctttaacgaaattaaaaaattcgacaatgatgcggaagaacaattcggtactatagaagaactcaagcagaaacttagattaaattctgaagagggagcagataactttatagattatataaaggtacaaaaacaggatatcgtcaaacttactgtatacgattgcatatctatgataggattgtgtgcatgcgtggtagatgtttggagaaatgagaaactgttttctagatggaaatattgtttacgagctattaaactgtttattaatgatcacatgcttgataagataaaatctatactgcagaatagactagtatatgtggaaatgtcatagaaagttaaaagttaatgagagcaaaaatatataaggttgtattccatatttgttattttttctgtaatagttaaaaaaatacattcgatggtctatctatcagattattatgtgttataaggtactttttctcataataaactagagtatgagtaagatagtgtttttcaaaacatataaatctaaaattgatggatgagatatacagctattaatttcgaaaatatattttaatctgataactttaaacatggatttttgatggtggtttaacgttttaaaaaaagattttgttattgtagtatatgataatattaaaagatggatataaagaatttgctgactgcatgtactattttttacattactacattggctacggcagatatacctactccgccaccaacgggtcatgtgacaagggagaatatcttgataagaggcataatcaatgttgtaatcggtgtccacctggagaatttgccaaggttagatgtaatggtaacgataacacaaaatgtgaacgctgcccacctcatacatataccacaatcccaattattctaatggatgtcatcaatgtagaaaatgcccaacaggatcatttgataaggtaaagtgtaccggaacacagaacagtaaatgttcgtgtcttcctggttggtattgcgctactgattcttcacagactgaagattgttgaaattgtataccaaaaaggagatgtccatgcggatactttggtggaatagatgaacaaggaaatcctatttgtaaatcgtgttgtgttggtgaatattgcgactacctacgtaattatagacttgatccatttcctccatgcaaactatctaaatgtaattaattatgattttgatgataatgttaccatacattatatcgctacttggttagtgtattattcagtatgaagacctattaataattacttatcttttgacgatcttgttataattataatataaaaatacttatggcatagtaactcataattgctgacgcgataaattcgtaataatctgttttgttcaaaggaatctacaggcataaaaataaaaatataatttataatatactcttacaacgccatcatgaataacagcagtgaattgattgctgttattaatggatttagaaatagtggacgattttgtgatattaatatagttattaatgatgaaaggataaacgctcataaactcatcctatctggagcctccgaatatttttccattctgttttccaataattttatcgattctaatgaatacgaagttaatctaagtcatttagattatcaaagtgttaacgatttgatcgattacatttatgggatacctttgagcctaactaacgataacgtgaaatatattctttcaaccgctgattttttacaaattggatctgccattacggagtgtgaaaattacatacttaaaaatctttgttctaaaaactgtatcgatttctacatatacgctgataaatataataacaagaaaatagaatcagcgtcgtttaacacaatattacaaaatattttgagactcatcaacgatgaaaactttaaatacttaacagaggaatcaatgataaaaattttaagcgatgatatgttaaatataaaaaatgaggatttcgccccactaattctcattaaatggttagagagtactcaacaatcatgcaccgtcgagttacttaaatgcctcagaatatcattgctttccccacaagttataaaatcactttatagtcatcgactggttagttcaatctacgaatgtataacattcttaaacaatatagcattcttggatgaatcatttcctagataccatagcatcgagttgatatctatcggtataagtaattcgcgtgataaaatttccataaactgctacaatcataaaaaaaatacatgggaaatgatatcttcacgtagatataggtgtagtttcgcagtggccgtcctggataatattatttatatgatgggtggatatgatcagtccccgtatagaagttcaaaggttatagcgtacaatacatgtacaaattcttggatatatgatataccagagctaaaatatcctcgttctaattgtgggggactggctgatgacgaatacatttattgtataggcggcatacgcgatcaggattcatcgttgacatctagtattgataaatggaagccatcaaaaccatattggcagaagtatgctaaaatgcgcgaaccaaaatgtgatatgggggttgcgatgttaaacggattaatatatgttataggtggaatcgttaaaggtgacacgtgtaccgacgcactagagagtttatcagaagatggatggatgaagcatcaacgtcttccaataaaaatgtccaatatgtcgacgattgttcatgatggcaagatttatatatctggaggttacaacaatagtagtgtagttaatgtaatatcgaatctagtccttagctataatccgatatatgatgaatggaccaaattatcatcattaaacattcctagaattaatcccgctctatggtcagcgcataataaattatatgtaggaggaggaatatctgatgatgttcgaactaatacatctgaaacatacgataaagaaaaagattgttggacattggataatggtcacgtgttaccacgcaattatataatgtataaatgcgaaccgattaaacataaatatccattggaaaaaacacagtacacgaatgattttctaaagtatttggaaagttttataggtagttgatagaacaaaatacataattttgtaaaaataaatcactttttatactaatatgacacgattaccaatacttttgttactaatatcattagtatacgctacaccttttcctcagacatctaaaaaaataggtgatgatgcaactctatcatgtaatcgaaataatacaaatgactacgttgttatgagtgcttggtataaggagcccaattccattattcttttagctgctaaaagcgacgtcttgtattttgataattataccaaggataaaatatcttacgactctccatacgatgatctagttacaactatcacaattaaatcattgactgctagagatgccggtacttatgtatgtgcattctttatgacatcgcctacaaatgacactgataaagtagattatgaagaatactccacagagttgattgtaaatacagatagtgaatcgactatagacataatactatctggatctacacattcaccagaaactagttctgagaaacctgattatatagataattctaattgctcgtcggtattcgaaatcgcgactccggaaccaattactgataatgtagaagatcatacagacaccgtcacatacactagtgatagcattaatacagtaagtgcaacatctggagaatccacaacagacgagactccggaaccaattactgataaagaagaagatcatacagtcacagacactgtctcatacactacagtaagtacatcatctggaattgtcactactaaatcaaccaccgatgatgcggatctttatgatacgtacaatgataatgatacagtaccatcaactactgtaggtagtagtacaacctctattagtaattataaaaccaaggactttgtagaaatatttggtattaccgcattaattatattgtcggccgtggcaatattctgtattacgtattatatatgtaataaacgttcacgtaaatacaaaacagagaacaaagtctagatttttgacttacataaatgtctgggatagtaaaatctatcatattgagcggaccatctggttcaggaaagacagccatagccaaaagactatgggaatatatttggatttgtggtgtcccataccactagatttcctcgtcctatggaacgagaaggtgtcgattaccattacgttaacagagaggccatctggaagggaatagccgccggaaactttctagaacatactgagtttttaggaaatatttacggaacttctaaaactgctgtgaatacagcggctattaataatcgtatttgtgtgatggatttaaacatcgacggtgttagaagttttaaaaatacttacctaatgccttactcggtgtatataagacctacctctcttaaaatggttgagaccaagcttcgttgtagaaacactgaagctaacgatgagattcatcgtcgcgtgatattggcaaaaacggatatggatgaggccaacgaagcaggtctattcgacactattattattgaagatgatgtgaatttagcatatagtaagttaattcagatactacaggaccgtattagaatgtattttaacactaattaaagacttaagacttaaaacttgataattaataatataactcgtttttatatgtggctatttcaacgtctaatgtattagttaaatattaaaacttaccacgtaaaacttaaaatttaaaatgatatttcattgacagatagatcacacattatgaactttcaaggacttgtgttaactgacaattgcaaaaatcaatgggtcgttggaccattaataggaaaaggtggatttggtagtatttatactactaatgacaataattatgtagtaaaaatagagcccaaagctaacggatcattatttaccgaacaggcattttatactagagtacttaaaccatccgttatcgaagaatggaaaaaatctcacaatataaagcacgtaggtcttatcacgtgcaaggcatttggtctatacaaatccattaatgtggaatatagattcttggtaattaatagattaggtgtagatctagatgcggtgatcagagccaataataatagattaccaaaaaggtcggtgatgttgatcggaatcgaaatcttaaataccatacaatttatgcacgagcaaggatattctcacggagatattaaagcgagtaatatagtcttggatcaaatagataagaataaattatatctagtggattacggattggtttctaaattcatgtctaatggcgaacatgttccatttataagaaatccaaataaaatggataacggtactctagaatttacacctatagattcgcataaaggatacgttgtatctagacgtggagatctagaaacacttggatattgtatgattagatggttgggaggtatcttgccatggactaagatatctgaaacaaagaattgtgcattagtaagtgccacaaaacagaaatatgttaacaatactgcgactttgttaatgaccagtttgcaatatgcacctagagaattgctgcaatatattaccatggtaaactctttgacatattttgaggaacccaattacgacgagtttcggcacatattaatgcagggtgtatattattaagtgtggtgtttggtcgatgtaaaatttttgtcgataaaaattaaaaaataacttaatttattattgatctcgtgtgtacaaccgaaatcatggcgatgttttacgcacacgctctcggtgggtacgacgagaatcttcatgcctttcctggaatatcatcgactgttgccaatgatgtcaggaaatattctgttgtgtcagtttataataacaagtatgacattgtaaaagacaaatatatgtggtgttacagtcaggtgaacaagagatatattggagcactgctgcctatgtttgagtgcaatgaatatctacaaattggagatccgatccatgatcaagaaggaaatcaaatctctatcatcacatatcgccacaaaaactactatgctctaagcggaatcgggtacgagagtctagacttgtgtttggaaggagtagggattcatcatcacgtacttgaaacaggaaacgctgtatatggaaaagttcaacatgattattctactatcaaagagaaggccaaagaaatgagtacacttagtccaggacctataattgattaccacgtctggataggagattgtatctgtcaagttactgctgtggacgtacatggaaaggaaattatgagaatgagattcaaaaagggtgcggtgcttccgatcccaaatctggtaaaagttaaacttggggagaatgatacagaaaatctttcttctactatatcggcggcaccatcgaggtaaccacctctctggaagacagcgtgaataatgtactcatgaaacgtttggaaactatacgccatatgtggtctgttgtatatgatcattttgatattgtgaatggtaaagaatgctgttatgtgcatacgcattcatctaatcaaaatcctataccgagtactgtaaaaacaaatttgtacatgaagactatgggatcatgcattcaaatggattccatggaagctctagagtatcttagcgaactgaaggaatcaggtggatggagtcccagaccagaaatgcaggaatttgaatatccagatggagtggaagacactgaatcaattgagagattggtagaggagttcttcaatagatcagaacttcaggctggtaaattagtcaaatttggtaattctattaattgttaaacatacatctgtttcagctaagcaactaagaacacgtatacggcagcagcttcctttatactctcatcttttaccaacacaaagggtggatatttgttcattggagttgataataatacacacaaagtatttggattcacggtgggttacgactacctcagactggtagagaatgatatagaaaagcatatcaaaagactttgtgttgtgcatttctgtgagaagaaagaggacatcaagtacgcgtgtcgattcatcaaggtatataaacctggggatgaggctacctcgacatacgtgtgcgctatcaaagtggaaagatgctgttgtgctgtgtttgcagattggccagaatcatggtatatggatactaatggtatcaagaagtattctccagatgaatgggtgtcacatataaaattttaattaatgtaactatagagaacaaataataggttgtaatatcatatagacaataactaacaattaattagtaactgttatctcttttttaactaaccaactaactatatacctattaatacatcgtaattatagttcttaacatctattaatcattgattcgcttctttaattttttataaactaacattgttaattgaaaagggataacatgttacagaatataaattatatatggatttttttaaaaaggaaatacttgactggagtgtatatttatctcttcattatatagcacgcgtgtgttccaattcttccacatcccatataatacaggattataatctcattcgaacatacgagaaagtggataaaacaatagttgattttttatctaggttgccaaatttattccatattttagaatatggggaaaatattctacatatttattctatggatgatgctaatacgaatattataattttttttctagatagagtattaaatattaataagaacgggtcatttatacacaatctcaggttatcatcatccattaatataaaagaatatgtatatcaattagttaataatgatcatccagataataggataagactaatgcttgaaaatggacgtagaacaagacattttttgtcctatatatcagatacagttaatatctatatatgtattttaataaatcatggattttatatagatgccgaagacagttacggttgtacattattacatagatgtatatatcactataagaaatcagaatcagaatcatacaatgaattaattaagatattgttaaataatggatcagatgtagataaaaaagatacgtacggaaacacaccttttatcctattatgtaaacacgatatcaacaacgtggaattgtttgagatatgtttagagaatgctaatatagactctgtagactttaatagatatacacctcttcattatgtctcatgtcgtaataaatatgattttgtaaagttattaatttctaaaggagcaaatgttaatgcgcgtaataaattcggaactactccattttattgtggaattatacacggtatctcgcttataaaactatatttggaatcagacacagagttagaaatagataatgaacatatagttcgtcatttaataatttttgatgctgttgaatctttagattatctattatccagaggagttattgatattaactatcgtactatatacaacgaaacatctatttacgacgctgtcagttataatgcgtataatacgttggtctatctattaaacagaaatggtgattttgagacgattactactagtggatgtacatgtatttcggaagcagtcgcaaacaacaacaaaataataatggaagtactattgtctaaacgaccatctttgaaaattatgatacagtctatgatagcaattactaaaaataaacaacataatgcagatttattgaaaatgtgtataaaatatactgcgtgtatgaccgattatgatactcttatagatgtacagtcgctacagcaatataaatggtatattttaaaatgtttcgatgaaatagatatcatgaagagatgttatataaaaaataaaactgtattccaattagttttttgtatcaaagacattaatactttaatgagatacggtaaacatccttctttcgtgaagtgcactagtctcgacgtatacggaagtcgtgtacgtaatatcatagcatctattagatatcgtcagagattaattagtctattatccaagaagctggatgcgggagataaatggtcgtgttttcctaacgaaataaaatataaaatattggaaaactttaacgataacgaactgtccacatatctaaaaatcttataaacactattaaaatataaaatctaagtaggataaaatcacactacatcattgtttccttttagtgctcgacagtgtatactatttttaacactcataaataaaaatgaaaacgatttccgttgttacgttgttatgcgtactacctgctgttgtttattcaacatgtactgtacccactatgaataacgctaaattaacgtctaccgaaacatcgtttaataataaccagaaagttacgtttacatgtgatcagggatatcattcttcggatccaaatgctgtctgcgaaacagataaatggaaatacgaaaatccatgcaaaaaaatgtgcacagtttctgattacatctctgaactatataataaaccgctatacgaagtgaattccaccatgacactaagttgcaacggcgaaacaaaatattttcgttgcgaagaaaaaaatggaaatacttcttggaatgatactgttacgtgtcctaatgcggaatgtcaacctcttcaattagaacacggatcgtgtcaaccagttaaagaaaaatactcatttggggaatatatgactatcaactgtgatgttggatatgaggttattggtgcttcgtacataagttgtacagctaattcttggaatgttattccatcatgtcaacaaaaatgtgatataccgtctctatctaatggattaatttccggatctacattttctatcggtggcgttatacatcttagttgtaaaagtggttttatactaacgggatctccatcatccacatgtatcgacggtaaatggaatcccgtactcccaatatgtgtacgaactaacgaagaatttgatccagtggatgatggtcccgacgatgagacagatttgagcaaactctcgaaagacgttgtacaatatgaacaagaaatagaatcgttagaagcaacttatcatataatcatagtggcgttaacaattatgggcgtcatatttttaatctccgttatagtattagtttgttcctgtgacaaaaataatgaccaatataagttccataaattgctaccgtaaatataaatccgttaaaataattaataattaataattaataattaataacgaacaagtatcaaaagattaaagacttatagctagaatcaattgagatgtcttcttcagtggatgttgatatctacgatgccgttagagcatttttactcaggcactattataacaagagatttattgtgtatggaagaagtaacgccatattacataatatatacaggctatttacaagatgcgccgttataccgttcgatgatatagtacgtactatgccaaatgaatcacgtgttaaacaatgggtgatggatacacttaatggtataatgatgaatgaacgcgatgtttctgtaagcgttggcaccggaatactattcatggaaatgtttttcgattacaataaaaatagtatcaacaatcaactaatgtatgatataattaatagcgtatctataattctagctaatgagagatatagaagcgcttttaacgacgatggtatatacatccgtagaaatatgattaacaagttgtacggatacgcatctctaactactattggcacgatcgctggaggtgtttgttattatctgttgatgcatctagttagtttgtataaataattatttcaatatactagttaaaattttaagattttaaatgtataaaaaactaataacgtttttatttgtaataggtgcattagcatcctattcgaataatgagtacactccgtttaataaactgagtgtaaaactctatatagatggagtagataatatagaaaattcatatactgatgataataatgaattggtgttaaattttaaagagtacacaatttctattattacagagtcatgcgacgtcggatttgattccatagatatagatgttataaacgactataaaattattgatatgtataccattgactcgtctactattcaacgcagaggtcacacgtgtagaatatctaccaaattatcatgccattatgataagtacccttatattcacaaatatgatggtgatgagcgacaatattctattactgcagagggaaaatgctataaaggaataaaatatgaaataagtatgatcaacgatgatactctattgagaaaacatactcttaaaattggatctacttatatatttgatcgtcatggacatagtaatacatattattcaaaatatgatttttaaaaatttaaaatatattatcacttcagtgacagtagtcaaataacaagctggccgcataacttcgtataatgtatgctatacgaagttatgtcgacgatgttcccaatttcaaggacaaaatggccagagttatcaagagaaaatttaataaacagtctcaatcttatttaactaaatttctcggtagcacatcaaatgatgttaccacttttcttagcatgcttaacttgactaaatattcataactaatttttattaatgatacaaaaacgaaataaaactgcatattatacactggttaacgcccttataggctctaaccattttcaagatgaggtccctgattatagtccttctgttcccctctatcatctactccatgtctattagacgatgtgagaagactgaagaggaaacatggggattgaaaatagggttgtgtataattgccaaagatttctatcccgaaagaactgattgcagtgttcatctcccaactgcaagtgaaggattgataactgaaggcaatggattcagggatatacgaaacaccgataaattataaaaaaagcaatgtgtccgctgtttccgttaataatactattttcgtaactggcggattattcataaataactctaatagcacgatcgtggttaacaatatggaaaaacttgacatttataaagacaaacaatggtcgattatagaaatgcctatggctagggtatatcacggcatcgactcgacatttggaatgttatattttgccggaggtctatccgttaccgaacaatatggtaatttagagaaaaacaacgagatatcttgttacaatcctagaacgaataagtggtttgatatttcatatactatttataagatatccatatcatcattgtgtaaactaaataacgtcttctatgtatttagtaaggacattggatatgtggaaaagtatgatggtgcatggaagttagtacatgatcgtctccccgctataaaggcattatcaacttctccttattgattgaaaatgaaaatataaatagtttttatgtatagcagtattaccctatagttttattgcttactactaacatggatacagatacagatacagatacagatacagatacagatacagatacagatacagatgttacaaatgtagaagatatcataaatgaaatagatagagagaaagaagaaatactaaaaaatgtagaaattgaaaataataaaaacattaacaagaatcatccaagtggatatattagagaagcactcgttattaatacaagtagtaatagtgattccattgataaagaagttatagaatgtatcagtcacgatgtaggaatatagatcatatctactaatttttataatcaatacaaaacataaaaaacaactcgttattacatagcaggcatggaatccttcaagtattgttttgataacgatggcaagaaatggattatcggaaatactttatattctggtaattcaatactctataaggtcagaaaaaatttcactagttcgttctacaattacgtaatgaagatagatcacaaatcacacaagccattgttgtctgaaatacgattctatatatctgtattggatcctttgactatcgacaactggacacgggaacgtggtataaagtatttggctattccagatctgtatggaattggagaaaccgatgattatatgttcttcgttataaagaatttgggaagagtattcgccccaaaggatactgaatcagtcttcgaagcatgtgtcactatgataaacacgttagagtttatacactctcgaggatttacccatggaaaaatagaaccgaggaatatactgattagaaataaacgtctttcactaattgactattctagaactaacaaactatacaagagtggaaactcacatatagattacaacgaggacatgataacttcaggaaatatcaattatatgtgtgtagacaatcatcttggagcaacagtttcaagacgaggagatttagaaatgttgggatattgcatgatagaatggttcggtggcaaacttccatggaaaaacgaaagtagtataaaagtaataaaacaaaaaaaagaatataaaaaatttatagctactttctttgaggactgttttcctgaaggaaatgaacctctggaattagttagatatatagaattagtatacacgttagattattctcaaactcctaattatgacagactacgtagactgtttatacaagattgaaattatattctttttttatagagtgtggtagtgttacggatatctaatattaatattagactatctctatcgcgctacacgaccaatatcgattactatgaatatcttctatgaaaggagagaatgtattcatttctccagcgtcaatctcgtcagtattgacaatactgtattatggagctaatggatccactgctgaacagctatcaaaatatgtagaaacggaggagaacacggataaggttagcgctcagaatatctcattcaaatccataaataaagtatatgggcgatattctgccgtgtttaaagatttctttttgggaaaaattggcgataagtttcaaactgttgacttcactgattgtcgcactatagatgcaatcaacaagtgtgtagatatctttactgaggggaaaatcaatccactattggatgaaccattgtctcctagcaattagtgccgtatactttaaagcaaaatggttgacgccattcgaaaaggaatttaccagtgattatcccttttacgtatcaccaacggaaatggtagatgtaagtatgatgtctatgtacggcgagctatttaatcacgcatctgtaaaggaatcattcggcaacttttcaatcatagaactgccatatgttggagatactagtatgatggtcattcttccagacaagattgatggattagaatccatagaacaaaatctaacagatacaaattttaagaaatggtgtaactctctggatgctatgtttatagatgttcacattcccaagtttaaggtaacaggctcgtataatctggtggatactctagtaaagatccgctgatggaaacacagtgaatgctagattgtccagcgtgtccccaggacaaggtaaggactctcccgcgatcactcgtgaagaagctctggctatgatcaaagactgtgaggtgtctatcgacatcagatgtagcgaagaagagaaagacagcgacatcaagacccatccagtactcgggtctaacatctctcataagaaagtgagttacgaagatatcatcggttcaacgatcgtcgatacaaaatgtgtcaagaatctagagtttagcgttcgtatcggagacatgtgcaaggaatcatctgaacttgaggtcaaggatggattcaagtatgtcgacggatcggcatctgaaggtgcaaccgatgatacttcactcatcgattcaacaaaactcaaagcgtgtgtctga

SEQ ID NO: 211 - protein, 727 aa, Artificial Sequence
  Description of Artificial Sequence: Synthetic polypeptide
  MISC_FEATURE (1)..(20): Signal peptide sequence
  MISC_FEATURE (21)..(490): heavy chain sequence
  MISC_FEATURE (469)..(491): T2A sequence
  MISC_FEATURE (491)..(512): Signal peptide sequence
  MISC_FEATURE (513)..(727): light chain sequence
METDTLLLWVLLLWVPGSTGQVQLVESGGGVVQPGRSLRLSCAASGFTFSSYTMHWVRQAPGKGLEWVTFISYDGNNKYYADSVKGRFTISRDNSKNTLYLQMNSLRAEDTAIYYCARTGWLGPFDYWGQGTLVTVSSASTKGPSVFPLAPSSKSTSGGTAALGCLVKDYFPEPVTVSWNSGALTSGVHTFPAVLQSSGLYSLSSVVTVPSSSLGTQTYICNVNHKPSNTKVDKRVEPKSCDKTHTCPPCPAPELLGGPSVFLFPPKPKDTLMISRTPEVTCVVVDVSHEDPEVKFNWYVDGVEVHNAKTKPREEQYNSTYRVVSVLTVLHQDWLNGKEYKCKVSNKALPAPIEKTISKAKGQPREPQVYTLPPSRDELTKNQVSLTCLVKGFYPSDIAVEWESNGQPENNYKTTPPVLDSDGSFFLYSKLTVDKSRWQQGNVFSCSVMHEALHNHYTQKSLSLSPGKPRGSGEGRGSLLTCGDVEENPGPKLMAWTPGIFMVLSYLTGSFSEIVLTQSPGTLSLSPGERATLSCRASQSVGSSYLAWYQQKPGQAPRLLIYGAFSRATGIPDRFSGSGSGTDFTLTISRLEPEDFAVYYCQQYGSSPWTFGQGTKVEIKRTVAAPSVFIFPPSDEQLKSGTASVVCLLNNFYPREAKVQWKVDNALQSGNSQESVTEQDSKDSTYSLSSTLTLSKADYEKHKVYACEVTHQGLSSPVTKSFNRGEC

SEQ ID NO: 212 - protein, 260 aa, Artificial Sequence
  Description of Artificial Sequence: Synthetic polypeptide
  MISC_FEATURE (235)..(255): B7-1 transmembrane domain
  MISC_FEATURE (235)..(260): B7-1 cytoplasmic domain
MCPARSLLLVATLVLLDHLSLARNLPVATPDPGMFPCLHHSQNLLRAVSNMLQKARQTLEFYPCTSEEIDHEDITKDKTSTVEACLPLELTKNESCLNSRETSFITNGSCLASRKTSFMMALCLSSIYEDLKMYQVEFKTMNAKLLMDPKRQIFLDQNMLAVIDELMQALNFNSETVPQKSSLEEPDFYKTKIKLCILLHAFRIRAVTIDRVMSYLNASGGGGSGGGGSGGGGSLLPSWAITLISVNGIFVICCLTYCFA

SEQ ID NO: 213 - protein, 186 aa, Artificial Sequence
  Description of Artificial Sequence: Synthetic polypeptide
MTVLAPAWSPTTYLLLLLLLSSGLSGTQDCSFQHSPISSDFAVKIRELSDYLLQDYPVTVASNLQDEELCGGLWRLVLAQRWMERLKTVAGSKMQGLLERVNTEIHFVTKCAFQPPPSCLRFVQTNISRLLQETSEQLVALKPWITRQNFSRCLELQCQPGAPRPQSPGPAACGALTWPRPHPAEP

SEQ ID NO: 214 - DNA, 2184 bp, Artificial Sequence
  Description of Artificial Sequence: Synthetic polynucleotide
atggaaacagacaccctattattatgggttttgcttctatgggtgccaggatctacgggtcaggttcagctagtcgaatcgggtggaggagtcgtgcagccgggacgttccttacgtttatcttgcgcagcgtctggttttactttctcgtcctacactatgcattgggttcgtcaggctccgggaaagggattggagtgggtaacatttataagttacgacggtaataataaatactatgcagacagtgtgaagggacgtttcactatatctcgagataatagtaagaacactttgtatttgcagatgaattcattgagagcggaagatacagcaatttactactgcgccagaaccggatggttgggtccctttgactattggggacagggtactcttgttacggtgtcttctgcttcaacaaagggtccctctgtcttcccgcttgcgccctcatcaaaatcgacgtcgggtggaaccgctgccttgggatgcttggttaaggactatttccccgaacctgtcaccgtgtcttggaattccggtgctctaacgtctggtgtgcacactttccctgccgttttacaaagttccggactatattcactttcgtccgtagtaactgttccaagttcgtcccttggaacacagacctatatatgcaacgtaaaccacaaaccctccaataccaaagtcgataaaagagttgagcctaaatcctgcgacaaaacacacacctgcccaccttgcccggcccctgaacttcttggaggaccatctgtattccttttcccaccgaagcctaaggacaccttgatgatatccagaactcccgaagtcacgtgcgtagtagtcgatgtgagtcacgaagatccggaagtcaagtttaactggtatgtagacggagtagaggttcataacgccaagaccaagccaagagaagaacaatataactcgacttacagagtcgtgtctgtattaaccgtcttgcatcaggactggttaaacggtaaagagtacaagtgcaaggtctccaataaagccctacctgcccccatcgaaaaaaccatatccaaggctaagggtcagcctagagaacctcaagtttacacattaccgcccagtagagatgaacttacgaagaatcaagtgagtctaacctgccttgttaaaggattctaccccagtgacatagcggtggagtgggagtccaacggtcaacccgagaacaattataagacgacaccgcccgttcttgacagtgacggatcgttctttctatactctaagttgactgtggataaatcccgatggcagcagggaaacgtattctcttgctcagtgatgcatgaggcgttgcacaatcattacacccaaaagtctttgtcgctaagtccaggtaaaccgcggggcagcggagagggcagaggaagcctgctgacttgtggcgatgtggaagagaaccctggccctaagcttatggcttggacaccaggaatcttcatggtacttagttacttgacaggatctttctcggaaatagtcttaactcagtcaccgggtacactttccctttcgcccggagagcgtgcgaccctatcgtgtcgagcttcccagtcggttggttcttcgtatcttgcttggtatcagcagaagcccggacaagctcctcgtcttttgatctacggtgcgttttcgagagcgactggtatcccggatagattttctggatcgggttctggtactgatttcactttaacgatttcgagactagagcccgaagattttgctgtgtattattgccagcaatatggatctagtccgtggacgttcggtcagggtaccaaggtcgagataaaaagaactgtggccgcaccctccgtgtttatctttcccccttccgacgaacagctaaagtcgggtactgcatcggtggtatgtttacttaacaacttttacccacgagaggccaaggtacaatggaaggtggataacgccttacaatcaggaaactcacaagagtccgtcaccgagcaagattccaaggacagtacatactcgttatcctcgacattaacattgagtaaggcggattatgagaagcataaggtttacgcatgcgaagtgacgcaccaaggactttcatcccccgtcaccaagtctttcaatcgtggtgagtgctga

SEQ ID NO: 215 - DNA, 783 bp, Artificial Sequence
  Description of Artificial Sequence: Synthetic polynucleotide
  misc_feature (703)..(765): B7-1 transmembrane domain
  misc_feature (703)..(780): B7-1 cytoplasmic domain
atgtgtcccgcgcgatcgttattgttagttgcgacgttggtcctacttgaccatctatcactagcgcgtaatttgcccgttgccacaccagatcccggaatgtttccttgcttacatcatagtcagaacttacttcgtgcagtctccaacatgttacagaaagcccgacagaccttagagttctatccctgtacttccgaagagatagatcacgaggacataacgaaagacaaaacatcgaccgttgaagcgtgcttacccttagaactaaccaaaaatgaaagttgtctaaactctagagaaacgagttttatcaccaatggaagttgcttggcgtctagaaaaacatcatttatgatggccttgtgtctttcctccatatacgaggacttgaagatgtatcaggtcgagttcaagacaatgaacgcgaaattgcttatggaccccaaacgacagatatttttggaccaaaacatgttagctgttatagacgaattgatgcaggcgctaaacttcaattcggaaactgtgccacagaagtcatccttagaggagcccgatttttacaagacaaaaatcaagttatgcattcttcttcacgcgtttagaattcgtgccgttacgattgatagagtaatgtcgtacttgaatgcgtcgggtggaggaggttccggaggaggaggatccggaggaggtggatccttacttccttcgtgggctataacattaatctccgttaatggtatcttcgtgatttgctgtctaacatactgctttgcatga

SEQ ID NO: 216 - DNA, 561 bp, Artificial Sequence
  Description of Artificial Sequence: Synthetic polynucleotide
atgacagtcttagcgccagcttggagtcctaccacatatttactactattattgcttttatctagtggtttatcaggaacgcaagactgctcattccaacattcaccgatcagttccgactttgcagttaagattcgagaactatcagactacctattgcaagactatccggtgacggtagcatcgaatcttcaagacgaagagctttgtggtggactatggcgtcttgtacttgcccaaagatggatggagcgactaaaaaccgttgccggttcaaagatgcagggtttactagagcgtgtgaatacggaaattcattttgttacgaaatgtgcgttccaacccccacccagttgcttgcgtttcgtgcagactaatatctctcgtttactacaagaaacatccgagcaactagtggcgctaaagccctggataacacgtcaaaactttagtcgttgcttggagttacagtgccaacccggtgccccacgacctcaaagtcctggtccagcggcttgcggagcccttacctggcctcgaccgcatccggccgaaccatga

SEQ ID NO: 217 - protein, 470 aa, Artificial Sequence
  Description of Artificial Sequence: Synthetic polypeptide
QVQLVESGGGVVQPGRSLRLSCAASGFTFSSYTMHWVRQAPGKGLEWVTFISYDGNNKYYADSVKGRFTISRDNSKNTLYLQMNSLRAEDTAIYYCARTGWLGPFDYWGQGTLVTVSSASTKGPSVFPLAPSSKSTSGGTAALGCLVKDYFPEPVTVSWNSGALTSGVHTFPAVLQSSGLYSLSSVVTVPSSSLGTQTYICNVNHKPSNTKVDKRVEPKSCDKTHTCPPCPAPELLGGPSVFLFPPKPKDTLMISRTPEVTCVVVDVSHEDPEVKFNWYVDGVEVHNAKTKPREEQYNSTYRVVSVLTVLHQDWLNGKEYKCKVSNKALPAPIEKTISKAKGQPREPQVYTLPPSRDELTKNQVSLTCLVKGFYPSDIAVEWESNGQPENNYKTTPPVLDSDGSFFLYSKLTVDKSRWQQGNVFSCSVMHEALHNHYTQKSLSLSPGKPRGSGEGRGSLLTCGDVEENPG

SEQ ID NO: 218 - protein, 215 aa, Artificial Sequence
  Description of Artificial Sequence: Synthetic polypeptide
EIVLTQSPGTLSLSPGERATLSCRASQSVGSSYLAWYQQKPGQAPRLLIYGAFSRATGIPDRFSGSGSGTDFTLTISRLEPEDFAVYYCQQYGSSPWTFGQGTKVEIKRTVAAPSVFIFPPSDEQLKSGTASVVCLLNNFYPREAKVQWKVDNALQSGNSQESVTEQDSKDSTYSLSSTLTLSKADYEKHKVYACEVTHQGLSSPVTKSFNRGEC

SEQ ID NO: 219 - protein, 512 aa, Vaccinia virus; identical to SEQ ID NO: 41

SEQ ID NO: 220 - protein, 15 aa, Artificial Sequence
  Description of Artificial Sequence: Synthetic peptide
RMPTVLQCVNVSVVS

SEQ ID NO: 221 - protein, 12 aa, Artificial Sequence
  Description of Artificial Sequence: Synthetic peptide
CTACRWKKACQR

SEQ ID NO: 222 - protein, 9 aa, Artificial Sequence
  Description of Artificial Sequence: Synthetic peptide
VLDGLDVLL

SEQ ID NO: 223 - protein, 10 aa, Artificial Sequence
  Description of Artificial Sequence: Synthetic peptide
SLYSFPEPEA

SEQ ID NO: 224 - protein, 10 aa, Artificial Sequence
  Description of Artificial Sequence: Synthetic peptide
ALYVDSLFFL

SEQ ID NO: 225 - protein, 9 aa, Artificial Sequence
  Description of Artificial Sequence: Synthetic peptide
SLLQHLIGL

SEQ ID NO: 226 - protein, 9 aa, Artificial Sequence
  Description of Artificial Sequence: Synthetic peptide
LYVDSLFFL

SEQ ID NO: 227 - protein, 11 aa, Artificial Sequence
  Description of Artificial Sequence: Synthetic peptide
TSEKRPFMCAY

SEQ ID NO: 228 - protein, 9 aa, Artificial Sequence
  Description of Artificial Sequence: Synthetic peptide
CMTWNQMNL

SEQ ID NO: 229 - protein, 11 aa, Artificial Sequence
  Description of Artificial Sequence: Synthetic peptide
LSHLQMHSRKH

SEQ ID NO: 230 - protein, 16 aa, Artificial Sequence
  Description of Artificial Sequence: Synthetic peptide
KRYFKLSHLQMHSRKH

SEQ ID NO: 231 - protein, 8 aa, Artificial Sequence
  Description of Artificial Sequence: Synthetic peptide
CYMEAVAL

SEQ ID NO: 232 - protein, 9 aa, Artificial Sequence
  Description of Artificial Sequence: Synthetic peptide
SLLFLLFSL

SEQ ID NO: 233 - protein, 9 aa, Artificial Sequence
  Description of Artificial Sequence: Synthetic peptide
VLPLTVAEV

SEQ ID NO: 234 - protein, 9 aa, Artificial Sequence
  Description of Artificial Sequence: Synthetic peptide
ALQGGGPPY

SEQ ID NO: 235 - protein, 9 aa, Artificial Sequence
  Description of Artificial Sequence: Synthetic peptide
LYPKARLAF

SEQ ID NO: 236 - protein, 9 aa, Artificial Sequence
  Description of Artificial Sequence: Synthetic peptide
AFLPWHRLF

SEQ ID NO: 237 - protein, 9 aa, Artificial Sequence
  Description of Artificial Sequence: Synthetic peptide
SLLMWITQC

SEQ ID NO: 238 - protein, 9 aa, Artificial Sequence
  Description of Artificial Sequence: Synthetic peptide
LAMPFATPM

SEQ ID NO: 239 - protein, 9 aa, Artificial Sequence
  Description of Artificial Sequence: Synthetic peptide
ARGPESRLL

SEQ ID NO: 240 - protein, 11 aa, Artificial Sequence
  Description of Artificial Sequence: Synthetic peptide
MLMAQEALAFL

SEQ ID NO: 241 - protein, 11 aa, Artificial Sequence
  Description of Artificial Sequence: Synthetic peptide
YLAMPFATPME

SEQ ID NO: 242 - protein, 10 aa, Artificial Sequence
  Description of Artificial Sequence: Synthetic peptide
ASGPGGGAPR

SEQ ID NO: 243 - protein, 10 aa, Artificial Sequence
  Description of Artificial Sequence: Synthetic peptide
LAAQERRVPR

SEQ ID NO: 244 - protein, 10 aa, Artificial Sequence
  Description of Artificial Sequence: Synthetic peptide
TVSGNILTIR

SEQ ID NO: 245 - protein, 13 aa, Artificial Sequence
  Description of Artificial Sequence: Synthetic peptide
APRGPHGGAASGL

SEQ ID NO: 246 - protein, 11 aa, Artificial Sequence
  Description of Artificial Sequence: Synthetic peptide
MPFATPMEAEL

SEQ ID NO: 247 - protein, 12 aa, Artificial Sequence
  Description of Artificial Sequence: Synthetic peptide
KEFTVSGNILTI

SEQ ID NO: 248 - protein, 9 aa, Artificial Sequence
  Description of Artificial Sequence: Synthetic peptide
MPFATPMEA

SEQ ID NO: 249 - protein, 9 aa, Artificial Sequence
  Description of Artificial Sequence: Synthetic peptide
FATPMEAEL

SEQ ID NO: 250 - protein, 11 aa, Artificial Sequence
  Description of Artificial Sequence: Synthetic peptide
FATPMEAELAR

SEQ ID NO: 251 - protein, 14 aa, Artificial Sequence
  Description of Artificial Sequence: Synthetic peptide
SLLMWITQCFLPVF

SEQ ID NO: 252 - protein, 25 aa, Artificial Sequence
  Description of Artificial Sequence: Synthetic peptide
LLEFYLAMPFATPMEAELARRSLAQ

SEQ ID NO: 253 - protein, 12 aa, Artificial Sequence
  Description of Artificial Sequence: Synthetic peptide
EFYLAMPFATPM

SEQ ID NO: 254 - protein, 25 aa, Artificial Sequence
  Description of Artificial Sequence: Synthetic peptide
PGVLLKEFTVSGNILTIRLTAADHR

SEQ ID NO: 255 - protein, 12 aa, Artificial Sequence
  Description of Artificial Sequence: Synthetic peptide
RLLEFYLAMPFA

SEQ ID NO: 256 - protein, 20 aa, Artificial Sequence
  Description of Artificial Sequence: Synthetic peptide
QGAMLAAQERRVPRAAEVPR

SEQ ID NO: 257 - protein, 13 aa, Artificial Sequence
  Description of Artificial Sequence: Synthetic peptide
PFATPMEAELARR

SEQ ID NO: 258 - protein, 20 aa, Artificial Sequence
  Description of Artificial Sequence: Synthetic peptide
PGVLLKEFTVSGNILTIRLT

SEQ ID NO: 259 - protein, 10 aa, Artificial Sequence
  Description of Artificial Sequence: Synthetic peptide
VLLKEFTVSG

SEQ ID NO: 260 - protein, 18 aa, Artificial Sequence
  Description of Artificial Sequence: Synthetic peptide
AADHRQLQLSISSCLQQL

SEQ ID NO: 261 - protein, 15 aa, Artificial Sequence
  Description of Artificial Sequence: Synthetic peptide
LKEFTVSGNILTIRL

SEQ ID NO: 262 - protein, 11 aa, Artificial Sequence
  Description of Artificial Sequence: Synthetic peptide
KEFTVSGNILT

SEQ ID NO: 263 - protein, 14 aa, Artificial Sequence
  Description of Artificial Sequence: Synthetic peptide
LLEFYLAMPFATPM

SEQ ID NO: 264 - protein, 14 aa, Artificial Sequence
  Description of Artificial Sequence: Synthetic peptide
AGATGGRGPRGAGA

SEQ ID NO: 265 - protein, 13 aa, Artificial Sequence
  Description of Artificial Sequence: Synthetic peptide
TYYRPGVNLSLSC

SEQ ID NO: 266 - protein, 13 aa, Artificial Sequence
  Description of Artificial Sequence: Synthetic peptide
EIIYPNASLLIQN

SEQ ID NO: 267 - protein, 15 aa, Artificial Sequence
  Description of Artificial Sequence: Synthetic peptide
YACFVSNLATGRNNS

SEQ ID NO: 268 - protein, 13 aa, Artificial Sequence
  Description of Artificial Sequence: Synthetic peptide
LWWVNNQSLPVSP

SEQ ID NO: 269 - protein, 13 aa, Artificial Sequence
  Description of Artificial Sequence: Synthetic peptide
NSIVKSITVSASG

SEQ ID NO: 270 - protein, 9 aa, Artificial Sequence
  Description of Artificial Sequence: Synthetic peptide
KTWGQYWQV

SEQ ID NO: 271 - protein, 10 aa, Artificial Sequence
  Description of Artificial Sequence: Synthetic peptide
AMLGTHTMEV

SEQ ID NO: 272 - protein, 9 aa, Artificial Sequence
  Description of Artificial Sequence: Synthetic peptide
ITDQVPFSV

SEQ ID NO: 273 - protein, 9 aa, Artificial Sequence
  Description of Artificial Sequence: Synthetic peptide
YLEPGPVTA

SEQ ID NO: 274 - protein, 10 aa, Artificial Sequence
  Description of Artificial Sequence: Synthetic peptide
LLDGTATLRL

SEQ ID NO: 275 - protein, 10 aa, Artificial Sequence
  Description of Artificial Sequence: Synthetic peptide
VLYRYGSFSV

SEQ ID NO: 276 - protein, 10 aa, Artificial Sequence
  Description of Artificial Sequence: Synthetic peptide
SLADTNSLAV

SEQ ID NO: 277 - protein, 9 aa, Artificial Sequence
  Description of Artificial Sequence: Synthetic peptide
RLMKQDFSV

SEQ ID NO: 278 - protein, 9 aa, Artificial Sequence
  Description of Artificial Sequence: Synthetic peptide
RLPRIFCSC

SEQ ID NO: 279 - protein, 9 aa, Artificial Sequence
  Description of Artificial Sequence: Synthetic peptide
LIYRRRLMK

SEQ ID NO: 280 - protein, 9 aa, Artificial Sequence
  Description of Artificial Sequence: Synthetic peptide
ALLAVGATK

SEQ ID NO: 281 - protein, 10 aa, Artificial Sequence
  Description of Artificial Sequence: Synthetic peptide
IALNFPGSQK

SEQ ID NO: 282 - protein, 9 aa, Artificial Sequence
  Description of Artificial Sequence: Synthetic peptide
RSYVPLAHR

SEQ ID NO: 283 - protein, 9 aa, Artificial Sequence
  Description of Artificial Sequence: Synthetic peptide
VVPCEPPEV

SEQ ID NO: 284 - protein, 9 aa, Artificial Sequence
  Description of Artificial Sequence: Synthetic peptide
HLYQGCQVV

SEQ ID NO: 285 - protein, 10 aa, Artificial Sequence
  Description of Artificial Sequence: Synthetic peptide
YLVPQQGFFC

SEQ ID NO: 286 - protein, 9 aa, Artificial Sequence
  Description of Artificial Sequence: Synthetic peptide
PLQPEQLQV

SEQ ID NO: 287 - protein, 9 aa, Artificial Sequence
  Description of Artificial Sequence: Synthetic peptide
TLEEITGYL

SEQ ID NO: 288 - protein, 9 aa, Artificial Sequence
  Description of Artificial Sequence: Synthetic peptide
ALIHHNTHL

SEQ ID NO: 289 - protein, 9 aa, Artificial Sequence
  Description of Artificial Sequence: Synthetic peptide
PLTSIISAV

SEQ ID NO: 290 - protein, 9 aa, Artificial Sequence
  Description of Artificial Sequence: Synthetic peptide
VLRENTSPK

SEQ ID NO: 291 - protein, 9 aa, Artificial Sequence
  Description of Artificial Sequence: Synthetic peptide
TYLPTNASL

SEQ ID NO: 292 - protein, 9 aa, Artificial Sequence
  Description of Artificial Sequence: Synthetic peptide
RYQLDPKFI

SEQ ID NO: 293 - protein, 9 aa, Artificial Sequence
  Description of Artificial Sequence: Synthetic peptide
ILFTINFTI

SEQ ID NO: 294 - protein, 9 aa, Artificial Sequence
  Description of Artificial Sequence: Synthetic peptide
VLFTINFTI

SEQ ID NO: 295 - protein, 9 aa, Artificial Sequence
  Description of Artificial Sequence: Synthetic peptide
TLNFTITNL

SEQ ID NO: 296 - protein, 9 aa, Artificial Sequence
  Description of Artificial Sequence: Synthetic peptide
VLQGLLKPL

SEQ ID NO: 297 - protein, 9 aa, Artificial Sequence
  Description of Artificial Sequence: Synthetic peptide
VLQGLLRPV

SEQ ID NO: 298 - protein, 9 aa, Artificial Sequence
  Description of Artificial Sequence: Synthetic peptide
RLDPKSPGV

SEQ ID NO: 299 - protein, 9 aa, Artificial Sequence
  Description of Artificial Sequence: Synthetic peptide
QLYWELSKL

SEQ ID NO: 300 - protein, 9 aa, Artificial Sequence
  Description of Artificial Sequence: Synthetic peptide
KLTRGIVEL

SEQ ID NO: 301 - protein, 9 aa, Artificial Sequence
  Description of Artificial Sequence: Synthetic peptide
QLTNGITEL

SEQ ID NO: 302 - protein, 9 aa, Artificial Sequence
  Description of Artificial Sequence: Synthetic peptide
QLTHNITEL

SEQ ID NO: 303 - protein, 9 aa, Artificial Sequence
  Description of Artificial Sequence: Synthetic peptide
TLDRNSLYV

SEQ ID NO: 304 - protein, 9 aa, Artificial Sequence
  Description of Artificial Sequence: Synthetic peptide
FLLSLALML

SEQ ID NO: 305 - protein, 9 aa, Artificial Sequence
  Description of Artificial Sequence: Synthetic peptide
NLGPWIQQV

SEQ ID NO: 306 - protein, 9 aa, Artificial Sequence
  Description of Artificial Sequence: Synthetic peptide
ILDSSEEDK

SEQ ID NO: 307 - protein, 10 aa, Artificial Sequence
  Description of Artificial Sequence: Synthetic peptide
YLPKSWTIQV

SEQ ID NO: 308 - protein, 12 aa, Artificial Sequence
  Description of Artificial Sequence: Synthetic peptide
WIHEQMERDLKT

SEQ ID NO: 309 - protein, 9 aa, Artificial Sequence
  Description of Artificial Sequence: Synthetic peptide
LLANAYIYV

SEQ ID NO: 310 - protein, 9 aa, Artificial Sequence
  Description of Artificial Sequence: Synthetic peptide
YLLCKAFGA

SEQ ID NO: 311 - protein, 9 aa, Artificial Sequence
  Description of Artificial Sequence: Synthetic peptide
KLSPYVHYT

SEQ ID NO: 312 - protein, 20 aa, Artificial Sequence
  Description of Artificial Sequence: Synthetic peptide
PDTRPAPGSTAPPAHGVTSA

SEQ ID NO: 313 - protein, 9 aa, Artificial Sequence
  Description of Artificial Sequence: Synthetic peptide
STAPPVHNV

SEQ ID NO: 314 - protein, 9 aa, Artificial Sequence
  Description of Artificial Sequence: Synthetic peptide
LLLLTVLTV

SEQ ID NO: 315 - protein, 12 aa, Artificial Sequence
  Description of Artificial Sequence: Synthetic peptide
PGSTAPPAHGVT

SEQ ID NO: 316 - protein, 9 aa, Artificial Sequence
  Description of Artificial Sequence: Synthetic peptide
MLAVISCAV

SEQ ID NO: 317 - protein, 9 aa, Artificial Sequence
  Description of Artificial Sequence: Synthetic peptide
RQKRILVNL

SEQ ID NO: 318 - protein, 9 aa, Artificial Sequence
  Description of Artificial Sequence: Synthetic peptide
NYNNFYRFL

SEQ ID NO: 319 - protein, 10 aa, Artificial Sequence
  Description of Artificial Sequence: Synthetic peptide
EYSKECLKEF

SEQ ID NO: 320 - protein, 9 aa, Artificial Sequence
  Description of Artificial Sequence: Synthetic peptide
EYLSLSDKI

SEQ ID NO: 321 - protein, 9 aa, Artificial Sequence
  Description of Artificial Sequence: Synthetic peptide
ELVRRILSR

SEQ ID NO: 322 - protein, 9 aa, Artificial Sequence
  Description of Artificial Sequence: Synthetic peptide
APRGVRMAV

SEQ ID NO: 323 - protein, 22 aa, Artificial Sequence
  Description of Artificial Sequence: Synthetic peptide
CLSRRPWKRSWSAGSCPGMPHL

SEQ ID NO: 324 - protein, 13 aa, Artificial Sequence
  Description of Artificial Sequence: Synthetic peptide
ILSRDAAPLPRPG

SEQ ID NO: 325 - protein, 9 aa, Artificial Sequence
  Description of Artificial Sequence: Synthetic peptide
EVDPASNTY

SEQ ID NO: 326 - protein, 10 aa, Artificial Sequence
  Description of Artificial Sequence: Synthetic peptide
GVYDGREHTV

SEQ ID NO: 327 - protein, 9 aa, Artificial Sequence
  Description of Artificial Sequence: Synthetic peptide
NYKRCFPVI

SEQ ID NO: 328 - protein, 8 aa, Artificial Sequence
  Description of Artificial Sequence: Synthetic peptide
SESLKMIF

SEQ ID NO: 329 - protein, 20 aa, Artificial Sequence
  Description of Artificial Sequence: Synthetic peptide
INKTSGPKRGKHAWTHRLRE

SEQ ID NO: 330 - protein, 20 aa, Artificial Sequence
  Description of Artificial Sequence: Synthetic peptide
YFSKKEWEKMKSSEKIVYVY

SEQ ID NO: 331 - protein, 20 aa, Artificial Sequence
  Description of Artificial Sequence: Synthetic peptide
MKLNYEVMTKLGFKVTLPPF

SEQ ID NO: 332 - protein, 20 aa, Artificial Sequence
  Description of Artificial Sequence: Synthetic peptide
KHAWTHRLRERKQLVVYEEI

SEQ ID NO: 333 - protein, 20 aa, Artificial Sequence
  Description of Artificial Sequence: Synthetic peptide
LGFKVTLPPFMRSKRAADFH

SEQ ID NO: 334 - protein, 20 aa, Artificial Sequence
  Description of Artificial Sequence: Synthetic peptide
KSSEKIVYVYMKLNYEVMTK

SEQ ID NO: 335 - protein, 9 aa, Artificial Sequence
  Description of Artificial Sequence: Synthetic peptide
SLGWLFLLL

SEQ ID NO: 336 - protein, 9 aa, Artificial Sequence
  Description of Artificial Sequence: Synthetic peptide
LSRLSNRLL

SEQ ID NO: 337 - protein, 9 aa, Artificial Sequence
  Description of Artificial Sequence: Synthetic peptide
TMNGSKSPV

SEQ ID NO: 338 - protein, 9 aa, Artificial Sequence
  Description of Artificial Sequence: Synthetic peptide
PLLENVISK

SEQ ID NO: 339 - protein, 9 aa, Artificial Sequence
  Description of Artificial Sequence: Synthetic peptide
SLSKILDTV

SEQ ID NO: 340 - protein, 9 aa, Artificial Sequence
  Description of Artificial Sequence: Synthetic peptide
AARAVFLAL

SEQ ID NO: 341 - protein, 9 aa, Artificial Sequence
  Description of Artificial Sequence: Synthetic peptide
EADPTGHSY

SEQ ID NO: 342 - protein, 9 aa, Artificial Sequence
  Description of Artificial Sequence: Synthetic peptide
KVLEYVIKV

SEQ ID NO: 343 - protein, 9 aa, Artificial Sequence
  Description of Artificial Sequence: Synthetic peptide
SLFRAVITK

SEQ ID NO: 344 - protein, 10 aa, Artificial Sequence
  Description of Artificial Sequence: Synthetic peptide
EVYDGREHSA

SEQ ID NO: 345 - protein, 9 aa, Artificial Sequence
  Description of Artificial Sequence: Synthetic peptide
RVRFFFPSL

SEQ ID NO: 346 - protein, 10 aa, Artificial Sequence
  Description of Artificial Sequence: Synthetic peptide
REPVTKAEML

SEQ ID NO: 347 - protein, 10 aa, Artificial Sequence
  Description of Artificial Sequence: Synthetic peptide
KEADPTGHSY

SEQ ID NO: 348 - protein, 9 aa, Artificial Sequence
  Description of Artificial Sequence: Synthetic peptide
DPARYEFLW

SEQ ID NO: 349 - protein, 11 aa, Artificial Sequence
  Description of Artificial Sequence: Synthetic peptide
ITKKVADLVGF

SEQ ID NO: 350 - protein, 9 aa, Artificial Sequence
  Description of Artificial Sequence: Synthetic peptide
SAFPTTINF

SEQ ID NO: 351 - protein, 9 aa, Artificial Sequence
  Description of Artificial Sequence: Synthetic peptide
SAYGEPRKL

SEQ ID NO: 352 - protein, 15 aa, Artificial Sequence
  Description of Artificial Sequence: Synthetic peptide
TSCILESLFRAVITK

SEQ ID NO: 353 - protein, 15 aa, Artificial Sequence
  Description of Artificial Sequence: Synthetic peptide
PRALAETSYVKVLEY

SEQ ID NO: 354 - protein, 16 aa, Artificial Sequence
  Description of Artificial Sequence: Synthetic peptide
FLLLKYRAREPVTKAE

SEQ ID NO: 355 - protein, 12 aa, Artificial Sequence
  Description of Artificial Sequence: Synthetic peptide
EYVIKVSARVRF

SEQ ID NO: 356 - protein, 10 aa, Artificial Sequence
  Description of Artificial Sequence: Synthetic peptide
YLQLVFGIEV

SEQ ID NO: 357 - protein, 9 aa, Artificial Sequence
  Description of Artificial Sequence: Synthetic peptide
EYLQLVFGI

SEQ ID NO: 358 - protein, 9 aa, Artificial Sequence
  Description of Artificial Sequence: Synthetic peptide
EGDCAPEEK

SEQ ID NO: 359 - protein, 14 aa, Artificial Sequence
  Description of Artificial Sequence: Synthetic peptide
LLKYRAREPVTKAE

SEQ ID NO: 360 - protein, 9 aa, Artificial Sequence
  Description of Artificial Sequence: Synthetic peptide
KASEKIFYV

SEQ ID NO: 361 - protein, 16 aa, Artificial Sequence
  Description of Artificial Sequence: Synthetic peptide
EKIQKAFDDIAKYFSK

SEQ ID NO: 362 - protein, 11 aa, Artificial Sequence
  Description of Artificial Sequence: Synthetic peptide
FGRLQGISPKI

SEQ ID NO: 363 - protein, 18 aa, Artificial Sequence
  Description of Artificial Sequence: Synthetic peptide
WEKMKASEKIFYVYMKRK

SEQ ID NO: 364 - protein, 15 aa, Artificial Sequence
  Description of Artificial Sequence: Synthetic peptide
KIFYVYMKRKYEAMT

SEQ ID NO: 365 - protein, 14 aa, Artificial Sequence
  Description of Artificial Sequence: Synthetic peptide
KIFYVYMKRKYEAM

SEQ ID NO: 366 - protein, 15 aa, Artificial Sequence
  Description of Artificial Sequence: Synthetic peptide
CEFHACWPAFTVLGE

SEQ ID NO: 367 - protein, 9 aa, Artificial Sequence
  Description of Artificial Sequence: Synthetic peptide
KFLDALISL

SEQ ID NO: 368 - protein, 10 aa, Artificial Sequence
  Description of Artificial Sequence: Synthetic peptide
ALGGHPLLGV

SEQ ID NO: 369 - protein, 9 aa, Artificial Sequence
  Description of Artificial Sequence: Synthetic peptide
LPRWPPPQL

SEQ ID NO: 370 - protein, 9 aa, Artificial Sequence
  Description of Artificial Sequence: Synthetic peptide
ILAKFLHWL

SEQ ID NO: 371 - protein, 9 aa, Artificial Sequence
  Description of Artificial Sequence: Synthetic peptide
RLVDDFLLV

SEQ ID NO: 372 - protein, 15 aa, Artificial Sequence
  Description of Artificial Sequence: Synthetic peptide
RPGLLGASVLGLDDI

SEQ ID NO: 373 - protein, 15 aa, Artificial Sequence
  Description of Artificial Sequence: Synthetic peptide
LTDLQPYMRQFVAHL

SEQ ID NO: 374 - protein, 9 aa, Artificial Sequence
  Description of Artificial Sequence: Synthetic peptide
VVVGAVGVG

SEQ ID NO: 375 - protein, 9 aa, Artificial Sequence
  Description of Artificial Sequence: Synthetic peptide
HLSTAFARV

SEQ ID NO: 376 - protein, 9 aa, Artificial Sequence
  Description of Artificial Sequence: Synthetic peptide
KIFGSLAFL

SEQ ID NO: 377 - protein, 9 aa, Artificial Sequence
  Description of Artificial Sequence: Synthetic peptide
IISAVVGIL

SEQ ID NO: 378 - protein, 9 aa, Artificial Sequence
  Description of Artificial Sequence: Synthetic peptide
ALCRWGLLL

SEQ ID NO: 379 - protein, 9 aa, Artificial Sequence
  Description of Artificial Sequence: Synthetic peptide
ILHNGAYSL

SEQ ID NO: 380 - protein, 9 aa, Artificial Sequence
  Description of Artificial Sequence: Synthetic peptide
RLLQETELV

SEQ ID NO: 381 - protein, 9 aa, Artificial Sequence
  Description of Artificial Sequence: Synthetic peptide
VVKGVVFGI

SEQ ID NO: 382 - protein, 10 aa, Artificial Sequence
  Description of Artificial Sequence: Synthetic peptide
YMIMVKCWMI

SEQ ID NO: 383 - protein, 9 aa, Artificial Sequence
  Description of Artificial Sequence: Synthetic peptide
SLLSGDWVL

SEQ ID NO: 384 - protein, 9 aa, Artificial Sequence
  Description of Artificial Sequence: Synthetic peptide
GLQLGVQAV

SEQ ID NO: 385 - protein, 9 aa, Artificial Sequence
  Description of Artificial Sequence: Synthetic peptide
PLTEYIQPV

SEQ ID NO: 386 - protein, 9 aa, Artificial Sequence
  Description of Artificial Sequence: Synthetic peptide
SPRWWPTCL

SEQ ID NO: 387 - protein, 9 aa, Artificial Sequence
  Description of Artificial Sequence: Synthetic peptide
GVALQTMKQ

SEQ ID NO: 388 - protein, 9 aa, Artificial Sequence
  Description of Artificial Sequence: Synthetic peptide
FMNKFIYEI

SEQ ID NO: 389 - protein, 10 aa, Artificial Sequence
  Description of Artificial Sequence: Synthetic peptide
QLAVSVILRV

SEQ ID NO: 390 - protein, 14 aa, Artificial Sequence
  Description of Artificial Sequence: Synthetic peptide
LPAVVGLSPGEQEY

SEQ ID NO: 391 - protein, 9 aa, Artificial Sequence
  Description of Artificial Sequence: Synthetic peptide
NYARTEDFF

SEQ ID NO: 392 - protein, 9 aa, Artificial Sequence
  Description of Artificial Sequence: Synthetic peptide
FLIIWQNTM

SEQ ID NO: 393 - protein, 14 aa, Artificial Sequence
  Description of Artificial Sequence: Synthetic peptide
TLYQDDTLTLQAAG

SEQ ID NO: 394 - protein, 10 aa, Artificial Sequence
  Description of Artificial Sequence: Synthetic peptide
SLYKFSPFPL

SEQ ID NO: 395 - protein, 9 aa, Artificial Sequence
  Description of Artificial Sequence: Synthetic peptide
KELEGILLL

SEQ ID NO: 396 - protein, 9 aa, Artificial Sequence
  Description of Artificial Sequence: Synthetic peptide
RLSSCVPVA

SEQ ID NO: 397 - protein, 10 aa, Artificial Sequence
  Description of Artificial Sequence: Synthetic peptide
VLLQAGSLHA

SEQ ID NO: 398 - protein, 9 aa, Artificial Sequence
  Description of Artificial Sequence: Synthetic peptide
LLNAFTVTV

SEQ ID NO: 399 - protein, 8 aa, Artificial Sequence
  Description of Artificial Sequence: Synthetic peptide
VLFYLGQY

SEQ ID NO: 400 - protein, 10 aa, Artificial Sequence
  Description of Artificial Sequence: Synthetic peptide
FIASNGVKLV

SEQ ID NO: 401 - protein, 9 aa, Artificial Sequence
  Description of Artificial Sequence: Synthetic peptide
ETVSEQSNV

SEQ ID NO: 402 - protein, 9 aa, Artificial Sequence
  Description of Artificial Sequence: Synthetic peptide
FLDEFMEGV

SEQ ID NO: 403 - protein, 8 aa, Artificial Sequence
  Description of Artificial Sequence: Synthetic peptide
QQITKTEV

SEQ ID NO: 404 - protein, 8 aa, Artificial Sequence
  Description of Artificial Sequence: Synthetic peptide
YRPRPRRY

SEQ ID NO: 405 - protein, 9 aa, Artificial Sequence
  Description of Artificial Sequence: Synthetic peptide
ALKDVEERV

SEQ ID NO: 406 - protein, 9 aa, Artificial Sequence
  Description of Artificial Sequence: Synthetic peptide
ISGGPRISY

SEQ ID NO: 407 - protein, 9 aa, Artificial Sequence
  Description of Artificial Sequence: Synthetic peptide
RQKKIRIQL

SEQ ID NO: 408 - protein, 16 aa, Artificial Sequence
  Description of Artificial Sequence: Synthetic peptide
HLGSRQKKIRIQLRSQ

SEQ ID NO: 409 - protein, 17 aa, Artificial Sequence
  Description of Artificial Sequence: Synthetic peptide
CATWKVICKSCISQTPG

SEQ ID NO: 410 - protein, 9 aa, Artificial Sequence
  Description of Artificial Sequence: Synthetic peptide
FLGYLILGV

SEQ ID NO: 411 - protein, 9 aa, Artificial Sequence
  Description of Artificial Sequence: Synthetic peptide
MIAVFLPIV

SEQ ID NO: 412 - protein, 15 aa, Artificial Sequence
  Description of Artificial Sequence: Synthetic peptide
HQQYFYKIPILVINK

SEQ ID NO: 413 - protein, 9 aa, Artificial Sequence
  Description of Artificial Sequence: Synthetic peptide
FLFLLFFWL

SEQ ID NO: 414 - protein, 9 aa, Artificial Sequence
  Description of Artificial Sequence: Synthetic peptide
TLMSAMTNL

SEQ ID NO: 415 - protein, 9 aa, Artificial Sequence
  Description of Artificial Sequence: Synthetic peptide
ALDVYNGLL

SEQ ID NO: 416 - protein, 10 aa, Artificial Sequence
  Description of Artificial Sequence: Synthetic peptide
FLTPKKLQCV

SEQ ID NO: 417 - protein, 10 aa, Artificial Sequence
  Description of Artificial Sequence: Synthetic peptide
VISNDVCAQV

SEQ ID NO: 418 - protein, 9 aa, Artificial Sequence
  Description of Artificial Sequence: Synthetic peptide
YYWPRPRRY

SEQ ID NO: 419 - protein, 9 aa, Artificial Sequence
  Description of Artificial Sequence: Synthetic peptide
NTYASPRFK

SEQ ID NO: 420 - protein, 10 aa, Artificial Sequence
  Description of Artificial Sequence: Synthetic peptide
SLFEGIDIYT

SEQ ID NO: 421 - protein, 9 aa, Artificial Sequence
  Description of Artificial Sequence: Synthetic peptide
ALSVMGVYV

SEQ ID NO: 422 - protein, 8 aa, Artificial Sequence
  Description of Artificial Sequence: Synthetic peptide
GLQLGVQA

SEQ ID NO: 423 - protein, 15 aa, Artificial Sequence
  Description of Artificial Sequence: Synthetic peptide
YSVYFNLPADTIYTN

SEQ ID NO: 424 - protein, 29 aa, Artificial Sequence
  Description of Artificial Sequence: Synthetic peptide
EDLTVKIGDFGLATEKSRWSGSHQFEQLS

SEQ ID NO: 425 - protein, 9 aa, Artificial Sequence
  Description of Artificial Sequence: Synthetic peptide
SYLDSGIHF

SEQ ID NO: 426 - protein, 12 aa, Artificial Sequence
  Description of Artificial Sequence: Synthetic peptide
FSWAMDLDPKGA

SEQ ID NO: 427 - protein, 10 aa, Artificial Sequence
  Description of Artificial Sequence: Synthetic peptide
ACDPHSGHFV

SEQ ID NO: 428 - protein, 9 aa, Artificial Sequence
  Description of Artificial Sequence: Synthetic peptide
CILGKLFTK

SEQ ID NO: 429 - protein, 9 aa, Artificial Sequence
  Description of Artificial Sequence: Synthetic peptide
AVCPWTWLR

SEQ ID NO: 430 - protein, 9 aa, Artificial Sequence
  Description of Artificial Sequence: Synthetic peptide
ILDKVLVHL

SEQ ID NO: 431 - protein, 9 aa, Artificial Sequence
  Description of Artificial Sequence: Synthetic peptide
GLFGDIYLA

SEQ ID NO: 432 - protein, 14 aa, Artificial Sequence
  Description of Artificial Sequence: Synthetic peptide
MIFEKHGFRRTTPP

SEQ ID NO: 433 - protein, 10 aa, Artificial Sequence
  Description of Artificial Sequence: Synthetic peptide
SLADEAEVYL

SEQ ID NO: 434 - protein, 10 aa, Artificial Sequence
  Description of Artificial Sequence: Synthetic peptide
TLDWLLQTPK

SEQ ID NO: 435 - protein, 9 aa, Artificial Sequence
  Description of Artificial Sequence: Synthetic peptide
ILNAMIAKI

SEQ ID NO: 436 - protein, 9 aa, Artificial Sequence
  Description of Artificial Sequence: Synthetic peptide
WRRAPAPGA

SEQ ID NO: 437 - protein, 9 aa, Artificial Sequence
  Description of Artificial Sequence: Synthetic peptide
PVTWRRAPA

SEQ ID NO: 438 - protein, 11 aa, Artificial Sequence
  Description of Artificial Sequence: Synthetic peptide
FLEGNEVGKTY

SEQ ID NO: 439 - protein, 9 aa, Artificial Sequence
  Description of Artificial Sequence: Synthetic peptide
KTLTSVFQK

SEQ ID NO: 440 - protein, 9 aa, Artificial Sequence
  Description of Artificial Sequence: Synthetic peptide
EEKLIVVLF

SEQ ID NO: 441 - protein, 11 aa, Artificial Sequence
  Description of Artificial Sequence: Synthetic peptide
SELFRSGLDSY

SEQ ID NO: 442 - protein, 9 aa, Artificial Sequence
  Description of Artificial Sequence: Synthetic peptide
FRSGLDSYV

SEQ ID NO: 443 - protein, 9 aa, Artificial Sequence
  Description of Artificial Sequence: Synthetic peptide
EAFIQPITR

SEQ ID NO: 444 - protein, 11 aa, Artificial Sequence
  Description of Artificial Sequence: Synthetic peptide
RVIKNSIRLTL

SEQ ID NO: 445 - protein, 9 aa, Artificial Sequence
  Description of Artificial Sequence: Synthetic peptide
KINKNPKYK

SEQ ID NO: 446 - protein, 9 aa, Artificial Sequence
  Description of Artificial Sequence: Synthetic peptide
YTDFHCQYV

SEQ ID NO: 447 - protein, 10 aa, Artificial Sequence
  Description of Artificial Sequence: Synthetic peptide
LLLDDLLVSI

SEQ ID NO: 448 - protein, 16 aa, Artificial Sequence
  Description of Artificial Sequence: Synthetic peptide
PYYFAAELPPRNLPEP

SEQ ID NO: 449 - protein, 10 aa, Artificial Sequence
  Description of Artificial Sequence: Synthetic peptide
ILDTAGREEY

SEQ ID NO: 450 - protein, 9 aa, Artificial Sequence
  Description of Artificial Sequence: Synthetic peptide
RPHVPESAF

SEQ ID NO: 451 - protein, 9 aa, Artificial Sequence
  Description of Artificial Sequence: Synthetic peptide
KIFSEVTLK

SEQ ID NO: 452 - protein, 9 aa, Artificial Sequence
  Description of Artificial Sequence: Synthetic peptide
SHETVIIEL

SEQ ID NO: 453 - protein, 15 aa, Artificial Sequence
  Description of Artificial Sequence: Synthetic peptide
GELIGILNAAKVPAD

SEQ ID NO: 454 - protein, 9 aa, Artificial Sequence
  Description of Artificial Sequence: Synthetic peptide
LYSACFWWL

SEQ ID NO: 455 - protein, 9 aa, Artificial Sequence
  Description of Artificial Sequence: Synthetic peptide
VLHWDPETV

SEQ ID NO: 456 - protein, 9 aa, Artificial Sequence
  Description of Artificial Sequence: Synthetic peptide
MSLQRQFLR

SEQ ID NO: 457 - protein, 20 aa, Artificial Sequence
  Description of Artificial Sequence: Synthetic peptide
ISPNSVFSQWRVVCDSLEDY

SEQ ID NO: 458 - protein, 10 aa, Artificial Sequence
  Description of Artificial Sequence: Synthetic peptide
SLPYWNFATG

SEQ ID NO: 459 - protein, 15 aa, Artificial Sequence
  Description of Artificial Sequence: Synthetic peptide
SQWRVVCDSLEDYDT

SEQ ID NO: 460 - protein, 9 aa, Artificial Sequence
  Description of Artificial Sequence: Synthetic peptide
SVYDFFVWL

SEQ ID NO: 461 - protein, 9 aa, Artificial Sequence
  Description of Artificial Sequence: Synthetic peptide
TLDSQVMSL

SEQ ID NO: 462 - protein, 9 aa, Artificial Sequence
  Description of Artificial Sequence: Synthetic peptide
LLGPGRPYR

SEQ ID NO: 463 - protein, 9 aa, Artificial Sequence
  Description of Artificial Sequence: Synthetic peptide
ANDPIFVVL

SEQ ID NO: 464 - protein, 15 aa, Artificial Sequence
  Description of Artificial Sequence: Synthetic peptide
QCTEVRADTRPWSGP

SEQ ID NO: 465 - protein, 10 aa, Artificial Sequence
  Description of Artificial Sequence: Synthetic peptide
ALPYWNFATG

SEQ ID NO: 466 - protein, 9 aa, Artificial Sequence
  Description of Artificial Sequence: Synthetic peptide
KCDICTDEY

SEQ ID NO: 467 - protein, 11 aa, Artificial Sequence
  Description of Artificial Sequence: Synthetic peptide
SSDYVIPIGTY

SEQ ID NO: 468 - protein, 9 aa, Artificial Sequence
  Description of Artificial Sequence: Synthetic peptide
MLLAVLYCL

SEQ ID NO: 469 - protein, 10 aa, Artificial Sequence
  Description of Artificial Sequence: Synthetic peptide
CLLWSFQTSA

SEQ ID NO: 470 - protein, 9 aa, Artificial Sequence
  Description of Artificial Sequence: Synthetic peptide
YMDGTMSQV

SEQ ID NO: 471 - protein, 11 aa, Artificial Sequence
  Description of Artificial Sequence: Synthetic peptide
IYMDGTADFSF

SEQ ID NO: 472 - protein, 9 aa, Artificial Sequence
  Description of Artificial Sequence: Synthetic peptide
QCSGNFMGF

SEQ ID NO: 473 - protein, 12 aa, Artificial Sequence
  Description of Artificial Sequence: Synthetic peptide
TPRLPSSADVEF

SEQ ID NO: 474 - protein, 9 aa, Artificial Sequence
  Description of Artificial Sequence: Synthetic peptide
LPSSADVEF

SEQ ID NO: 475 - protein, 10 aa, Artificial Sequence
  Description of Artificial Sequence: Synthetic peptide
LHHAFVDSIF

SEQ ID NO: 476 - protein, 9 aa, Artificial Sequence
  Description of Artificial Sequence: Synthetic peptide
SEIWRDIDF

SEQ ID NO: 477 - protein, 15 aa, Artificial Sequence
  Description of Artificial Sequence: Synthetic peptide
QNILLSNAPLGPQFP

SEQ ID NO: 478 - protein, 13 aa, Artificial Sequence
  Description of Artificial Sequence: Synthetic peptide
SYLQDSDPDSFQD

SEQ ID NO: 479 - protein, 21 aa, Artificial Sequence [sequence omitted]

SEQ ID NO: 480 - protein, 30 aa, Artificial Sequence
  Description of Artificial Sequence: Synthetic polypeptide
YTTAEEAAGIGILTVILGVLLLIGCWYCRR

SEQ ID NO: 481 - protein, 9 aa, Artificial Sequence
  Description of Artificial Sequence: Synthetic peptide
ALNFPGSQK

SEQ ID NO: 482 - protein, 9 aa, Artificial Sequence
  Description of Artificial Sequence: Synthetic peptide
VYFFLPDHL

SEQ ID NO: 483 - protein, 9 aa, Artificial Sequence
  Description of Artificial Sequence: Synthetic peptide
RTKQLYPEW

SEQ ID NO: 484 - protein, 10 aa, Artificial Sequence
  Description of Artificial Sequence: Synthetic peptide
HTMEVTVYHR

SEQ ID NO: 485 - protein, 9 aa, Artificial Sequence
  Description of Artificial Sequence: Synthetic peptide
SSPGCQPPA

SEQ ID NO: 486 - protein, 10 aa, Artificial Sequence
  Description of Artificial Sequence: Synthetic peptide
VPLDCVLYRY

SEQ ID NO: 487 - protein, 9 aa, Artificial Sequence
  Description of Artificial Sequence: Synthetic peptide
LPHSSSHWL

SEQ ID NO: 488 - protein, 8 aa, Artificial Sequence
  Description of Artificial Sequence: Synthetic peptide
SNDGPTLI

SEQ ID NO: 489 - protein, 15 aa, Artificial Sequence
  Description of Artificial Sequence: Synthetic peptide
GRAMLGTHTMEVTVY

SEQ ID NO: 490 - protein, 16 aa, Artificial Sequence
  Description of Artificial Sequence: Synthetic peptide
WNRQLYPEWTEAQRLD

SEQ ID NO: 491 - protein, 18 aa, Artificial Sequence
  Description of Artificial Sequence: Synthetic peptide
TTEWVETTARELPIPEPE

SEQ ID NO: 492 - protein, 17 aa, Artificial Sequence
  Description of Artificial Sequence: Synthetic peptide
TGRAMLGTHTMEVTVYH

SEQ ID NO: 493 - protein, 10 aa, Artificial Sequence
  Description of Artificial Sequence: Synthetic peptide
VLPDVFIRCV

SEQ ID NO: 494 - protein, 10 aa, Artificial Sequence
  Description of Artificial Sequence: Synthetic peptide
RYCNLEGPPI

SEQ ID NO: 495 - protein, 24 aa, Artificial Sequence
  Description of Artificial Sequence: Synthetic peptide
KWTEPYCVIAAVKIFPRFFMVAKQ

SEQ ID NO: 496 - protein, 20 aa, Artificial Sequence
  Description of Artificial Sequence: Synthetic peptide
KCCKIRYCNLEGPPINSSVF

SEQ ID NO: 497 - protein, 9 aa, Artificial Sequence
  Description of Artificial Sequence: Synthetic peptide
GLYDGMEHL

SEQ ID NO: 498 - protein, 9 aa, Artificial Sequence
  Description of Artificial Sequence: Synthetic peptide
FLWGPRALV

SEQ ID NO: 499 - protein, 9 aa, Artificial Sequence
  Description of Artificial Sequence: Synthetic peptide
VRIGHLYIL

SEQ ID NO: 500 - protein, 15 aa, Artificial Sequence
  Description of Artificial Sequence: Synthetic peptide
REPFTKAEMLGSVIR

SEQ ID NO: 501 - protein, 14 aa, Artificial Sequence
  Description of Artificial Sequence: Synthetic peptide
AELVHFLLLKYRAR

SEQ ID NO: 502 - protein, 10 aa, Artificial Sequence
  Description of Artificial Sequence: Synthetic peptide
LLFGLALIEV

SEQ ID NO: 503 - protein, 9 aa, Artificial Sequence
  Description of Artificial Sequence: Synthetic peptide
SESIKKKVL

SEQ ID NO: 504 - protein, 9 aa, Artificial Sequence
  Description of Artificial Sequence: Synthetic peptide
ASSTLYLVF

SEQ ID NO: 505 - protein, 15 aa, Artificial Sequence
  Description of Artificial Sequence: Synthetic peptide
SSTLYLVFSPSSFST

SEQ ID NO: 506 - protein, 9 aa, Artificial Sequence
  Description of Artificial Sequence: Synthetic peptide
QGQHFLQKV

SEQ ID NO: 507 - protein, 10 aa, Artificial Sequence
  Description of Artificial Sequence: Synthetic peptide
EVISCKLIKR

SEQ ID NO: 508 - protein, 9 aa, Artificial Sequence
  Description of Artificial Sequence: Synthetic peptide
FPSDSWCYF

SEQ ID NO: 509 - protein, 9 aa, Artificial Sequence
  Description of Artificial Sequence: Synthetic peptide
LYATVIHDI

SEQ ID NO: 510 - protein, 9 aa, Artificial Sequence
  Description of Artificial Sequence: Synthetic peptide
SSKALQRPV

SEQ ID NO: 511 - protein, 9 aa, Artificial Sequence
  Description of Artificial Sequence: Synthetic peptide
GFKQSSKAL

SEQ ID NO: 512 - protein, 17 aa, Artificial Sequence
  Description of Artificial Sequence: Synthetic peptide
ATGFKQSSKALQRPVAS

SEQ ID NO: 513 - protein, 16 aa, Artificial Sequence
  Description of Artificial Sequence: Synthetic peptide
TMKQICKKEIRRLHQY

SEQ ID NO: 514 - protein, 10 aa, Artificial Sequence
  Description of Artificial Sequence: Synthetic peptide
KILDAVVAQK

SEQ ID NO: 515 - protein, 9 aa, Artificial Sequence
  Description of Artificial Sequence: Synthetic peptide
RIAECILGM

SEQ ID NO: 516 - protein, 15 aa, Artificial Sequence
  Description of Artificial Sequence: Synthetic peptide
IGRIAECILGMNPSR

SEQ ID NO: 517 - protein, 10 aa, Artificial Sequence
  Description of Artificial Sequence: Synthetic peptide
YVDFREYEYY

SEQ ID NO: 518 - protein, 9 aa, Artificial Sequence
  Description of Artificial Sequence: Synthetic peptide
FLDRFLSCM

SEQ ID NO: 519 - protein, 11 aa, Artificial Sequence
  Description of Artificial Sequence: Synthetic peptide
SLIAAAAFCLA

SEQ ID NO: 520 - protein, 9 aa, Artificial Sequence
  Description of Artificial Sequence: Synthetic peptide
VVMSWAPPV

SEQ ID NO: 521 - protein, 25 aa, Artificial Sequence
  Description of Artificial Sequence: Synthetic peptide
NSNHVASGAGEAAIETQSSSSEEIV

SEQ ID NO: 522 - protein, 10 aa, Artificial Sequence
  Description of Artificial Sequence: Synthetic peptide
ILFGISLREV

SEQ ID NO: 523 - protein, 9 aa, Artificial Sequence
  Description of Artificial Sequence: Synthetic peptide
KVVEFLAML

SEQ ID NO: 524 - protein, 13 aa, Artificial Sequence
  Description of Artificial Sequence: Synthetic peptide
SSALLSIFQSSPE

SEQ ID NO: 525 - protein, 9 aa, Artificial Sequence
  Description of Artificial Sequence: Synthetic peptide
SFSYTLLSL

SEQ ID NO: 526 - protein, 9 aa, Artificial Sequence
  Description of Artificial Sequence: Synthetic peptide
VSSFFSYTL

SEQ ID NO: 527 - protein, 93 aa, Vaccinia virus
MHHPMESVKTTNTNAIICVREHTLPDYANTQCTPCGSGTFTSRNNHLPACLSCNGRRDRVTLLTIESVNALPDIIVFSKDHPDARHVFPKQNV

SEQ ID NO: 528 - protein, 15 aa, Artificial Sequence
  Description of Artificial Sequence: Synthetic peptide
KPLFRRMSSLELVIA

SEQ ID NO: 529 - protein, 9 aa, Artificial Sequence
  Description of Artificial Sequence: Synthetic peptide
MVKISGGPR

SEQ ID NO: 530 - protein, 9 aa, Artificial Sequence
  Description of Artificial Sequence: Synthetic peptide
EVDPIGHVY

SEQ ID NO: 531 - protein, 244 aa, Vaccinia virus; identical to SEQ ID NO: 150

SEQ ID NO: 532 - protein, 9 aa, Artificial Sequence
  Description of Artificial Sequence: Synthetic peptide
EVDPIGHLY

SEQ ID NO: 533 - protein, 9 aa, Artificial Sequence
  Description of Artificial Sequence: Synthetic peptide
KVAELVHFL

SEQ ID NO: 534 - protein, 9 aa, Artificial Sequence
  Description of Artificial Sequence: Synthetic peptide
TFPDLESEF

SEQ ID NO: 535 - protein, 9 aa, Artificial Sequence
  Description of Artificial Sequence: Synthetic peptide
VAELVHFLL

SEQ ID NO: 536 - protein, 10 aa, Artificial Sequence
  Description of Artificial Sequence: Synthetic peptide
MEVDPIGHLY

SEQ ID NO: 537 - protein, 9 aa, Artificial Sequence
  Description of Artificial Sequence: Synthetic peptide
AELVHFLLL

SEQ ID NO: 538 - protein, 9 aa, Artificial Sequence
  Description of Artificial Sequence: Synthetic peptide
WQYFFPVIF

SEQ ID NO: 539 - protein, 16 aa, Artificial Sequence
  Description of Artificial Sequence: Synthetic peptide
KKLLTQHFVQENYLEY

SEQ ID NO: 540 - protein, 15 aa, Artificial Sequence
  Description of Artificial Sequence: Synthetic peptide
RKVAELVHFLLLKYR

SEQ ID NO: 541 - protein, 16 aa, Artificial Sequence
  Description of Artificial Sequence: Synthetic peptide
ACYEFLWGPRALVETS

SEQ ID NO: 542 - protein, 12 aa, Artificial Sequence
  Description of Artificial Sequence: Synthetic peptide
VIFSKASSSLQL

SEQ ID NO: 543 - protein, 15 aa, Artificial Sequence
  Description of Artificial Sequence: Synthetic peptide
VFGIELMEVDPIGHL

SEQ ID NO: 544 - protein, 15 aa, Artificial Sequence
  Description of Artificial Sequence: Synthetic peptide
GDNQIMPKAGLLIIV

SEQ ID NO: 545 - protein, 15 aa, Artificial Sequence
  Description of Artificial Sequence: Synthetic peptide
TSYVKVLHHMVKISG

SEQ ID NO: 546 - protein, 16 aa, Artificial Sequence
  Description of Artificial Sequence: Synthetic peptide
RKVAELVHFLLLKYRA

SEQ ID NO: 547 - protein, 309 aa, Vaccinia virus; identical to SEQ ID NO: 99

SEQ ID NO: 548 - protein, 222 aa, Vaccinia virus; identical to SEQ ID NO: 163

SEQ ID NO: 549 - protein, 289 aa, Vaccinia virus
MELENEPVILPCPQINTLSSGYNILDILWEKRGADNDRIIPIDNGSNMLILNPTQSDSGIYICITTNETYCDMMSLNLTIVSVLESNIDLISYPQIVNERSTGEMVCPNINAFIASNVNADIIWSGHRRLRNKRLKQRTPGIITIEDVRKNDAGYYTCVLEYIYRGKTYNVTRIVKLEVRDKIIPSTMQLPDGIVTSIGSNLTIACRVSLRPPTTDADVFWISNGMYYEEDDGDGNGRISVANKIYMTDKRRVITSRLNINPVKEEDATTFTCMAFTIPSISKTVTVSI

SEQ ID NO: 550 - DNA, 827 bp, Vaccinia virus
acaacaccatgagatatattataattctcgcagttttgttcattaatagtatacacgctaaaataactagttataagtttgaatccgtcaattttgattccaaaattgaatggactggggatggtctatacaatatatcccttaaaaattatggcatcaagacgtggcaaacaatgtatacaaatgtaccagaaggaacatacgacatatccgcatttccaaagaatgatttcgtatctttctgggttaaatttgaacaaggcgattataaagtggaagagtattgtacgggactatgcgtcgaagtaaaaattggaccaccgactgtaacattgactgaatacgacgaccatatcaatttgtacatcgagcatccgtatgctactagaggtagcaaaaagattcctatttacaaacgcggtgacatgtgtgatatctacttgttgtatacggctaacttcacattcggagattctgaagaaccagtaacatatgatatcgatgactacgattgcacgtctacaggttgcagcatagactttgccacaacagaaaaagtgtgcgtgacagcacagggagccacagaagggtttctcgaaaaaattactccatggagttcggaagtatgtctgacacctaaaaagaatgtatatacatgtgcaattagatccaaagaagatgttcccaatttcaaggacaaaatggccagagttatcaagagaaaatttaataaacagtctcaatcttatttaactaaatttctcggtagcacatcaaatgatgttaccacttttcttagcatgcttaacttgactaaatattcataa

SEQ ID NO: 551 - DNA, 15 bp, Vaccinia virus
aaaatttaataaaca

SEQ ID NO: 552 - DNA, 150 bp, Vaccinia virus
gatgttcccaatttcaaggacaaaatggccagagttatcaagagaaaatttaataaacagtctcaatcttatttaactaaatttctcggtagcacatcaaatgatgttaccacttttcttagcatgcttaacttgactaaatattcataa

SEQ ID NO: 553 - DNA, 30 bp, Artificial Sequence
  Description of Artificial Sequence: Synthetic oligonucleotide
taaaaaatgaaaataaatacaaaggttctt

SEQ ID NO: 554 - DNA, 28 bp, Artificial Sequence
  Description of Artificial Sequence: Synthetic oligonucleotide
aaattgaaagcgagaaataatcataaat

SEQ ID NO: 555 - DNA, 15 bp, Artificial Sequence
  Description of Artificial Sequence: Synthetic oligonucleotide
aaaattgaaatttta

SEQ ID NO: 556 - DNA, 29 bp, Artificial Sequence
  Description of Artificial Sequence: Synthetic oligonucleotide
ttttattttttttttttggaatataaata

SEQ ID NO: 557 - DNA, 39 bp, Artificial Sequence
  Description of Artificial Sequence: Synthetic oligonucleotide
aaaattgaaattttattttttttttttggaatataaata

SEQ ID NO: 558 - DNA, 15 bp, Artificial Sequence
  Description of Artificial Sequence: Synthetic oligonucleotide
aaaattgaaaaaata

SEQ ID NO: 559 - DNA, 50 bp, Artificial Sequence
  Description of Artificial Sequence: Synthetic oligonucleotide
ttttattttttttttttggaatataaatatccggtaaaattgaaaaaata

SEQ ID NO: 560 - DNA, 28 bp, Artificial Sequence
  Description of Artificial Sequence: Synthetic oligonucleotide
  modified_base (3)..(3): a, c, t, g, unknown or other
  modified_base (10)..(10): a, c, t, g, unknown or other
  modified_base (18)..(21): a, c, t, g, unknown or other
ttnttttttntttttttnnnntataaat

SEQ ID NO: 561 - DNA, 28 bp, Artificial Sequence
  Description of Artificial Sequence: Synthetic oligonucleotide
ttgtattttcttttgttggcatataaat

SEQ ID NO: 562 - DNA, 28 bp, Artificial Sequence
  Description of Artificial Sequence: Synthetic oligonucleotide
tttattgtaagctttttccattttaaat

SEQ ID NO: 563 - DNA, 28 bp, Artificial Sequence
  Description of Artificial Sequence: Synthetic oligonucleotide
tcattttgtttttttctatgctataaat

SEQ ID NO: 564 - DNA, 30 bp, Artificial Sequence
  Description of Artificial Sequence: Synthetic oligonucleotide
taaaaatttaaaatatattatcacttcagt

SEQ ID NO: 565 - DNA, 30 bp, Artificial Sequence
  Description of Artificial Sequence: Synthetic oligonucleotide
aaaaaactgatattatataaatattttagt

SEQ ID NO: 566 - DNA, 30 bp, Artificial Sequence
  Description of Artificial Sequence: Synthetic oligonucleotide
  modified_base (1)..(2): a, c, t, g, unknown or other
  modified_base (7)..(7): a, c, t, g, unknown or other
  modified_base (14)..(14): a, c, t, g, unknown or other
  modified_base (18)..(30): a, c, t, g, unknown or other
nnaaaantgaaaanatannnnnnnnnnnnn

SEQ ID NO: 567 - DNA, 30 bp, Artificial Sequence
  Description of Artificial Sequence: Synthetic oligonucleotide
aaaaaaatgataaagtaggttcagttttat

SEQ ID NO: 568 - DNA, 30 bp, Artificial Sequence
  Description of Artificial Sequence: Synthetic oligonucleotide
taaaaagtgaaaaacaatattatttttatc

SEQ ID NO: 569 - DNA, 30 bp, Artificial Sequence
  Description of Artificial Sequence: Synthetic oligonucleotide
aaaattaaaaaataacttaatttattattg

SEQ ID NO: 570 - protein, 21 aa, Artificial Sequence
  Description of Artificial Sequence: Synthetic peptide
GSGEGRGSLLTCGDVEENPGP

SEQ ID NO: 571 - protein, 23 aa, Artificial Sequence
  Description of Artificial Sequence: Synthetic peptide
PRGSGEGRGSLLTCGDVEENPGP

SEQ ID NO: 572 - protein, 18 aa, Artificial Sequence
  Description of Artificial Sequence: Synthetic peptide
EGRGSLLTCGDVEENPGP

SEQ ID NO: 573 - protein, 22 aa, Artificial Sequence
  Description of Artificial Sequence: Synthetic peptide
GSGATNFSLLKQAGDVEENPGP

SEQ ID NO: 574 - protein, 19 aa, Artificial Sequence
  Description of Artificial Sequence: Synthetic peptide
ATNFSLLKQAGDVEENPGP

SEQ ID NO: 575 - protein, 23 aa, Artificial Sequence
  Description of Artificial Sequence: Synthetic peptide
GSGQCTNYALLKLAGDVESNPGP

SEQ ID NO: 576 - protein, 20 aa, Artificial Sequence
  Description of Artificial Sequence: Synthetic peptide
QCTNYALLKLAGDVESNPGP

SEQ ID NO: 577 - protein, 25 aa, Artificial Sequence
  Description of Artificial Sequence: Synthetic peptide
GSGVKQTLNFDLLKLAGDVESNPGP

SEQ ID NO: 578 - protein, 22 aa, Artificial Sequence
  Description of Artificial Sequence: Synthetic peptide
VKQTLNFDLLKLAGDVESNPGP

SEQ ID NO: 579 - DNA, 846 bp, Artificial Sequence
  Description of Artificial Sequence: Synthetic polynucleotide
atggagacagatactctattgctatgggttttgttattatgggtgccgggttccacgggaattcgtcgtgctgacattgttttaacacagtctccaggtaccctatcattgtcccctggtgagcgtgccacgcttagttgcagagcctctcagtctgtgggatcaagttatttagcttggtatcaacaaaaacctggacaagcacctcgtttgttaatatatggtgcattcagtagagcaactggaattcctgatcgattctcaggatctggatctggaacagacttcacacttaccatctcacgtcttgaacccgaggactttgcggtctactactgccagcagtatggttcgtcgccttggactttcggacaaggaaccaaagttgaaatcaagcgaggaggaggtggatcgggtggtggaggatccggtggaggtggaagtgaagcgaagctagtcgaatctggaggtggtgtagtgcagcctggacgttcgcttcgactatcctgtgctgcttcaggatttaccttttcatcttacacgatgcactgggtgcgtcaagcgcctggtaaaggactagagtgggtcacgtttatctcatacgacggtaataacaagtattatgctgattccgtaaagggacgtttcaccatatcgcgtgacaattctaagaataccttgtatcttcaaatgaatagtcttagagctgaagacactgccatttactattgtgcacgaacgggatggcttggaccttttgattattggggtcagggtactttggtcaccgtctccacagcgaagacaacacctccctcagtctatccacttgctccgcgtagttaa

SEQ ID NO: 580 - protein, 281 aa, Artificial Sequence
  Description of Artificial Sequence: Synthetic polypeptide
METDTLLLWVLLLWVPGSTGIRRADIVLTQSPGTLSLSPGERATLSCRASQSVGSSYLAWYQQKPGQAPRLLIYGAFSRATGIPDRFSGSGSGTDFTLTISRLEPEDFAVYYCQQYGSSPWTFGQGTKVEIKRGGGGSGGGGSGGGGSEAKLVESGGGVVQPGRSLRLSCAASGFTFSSYTMHWVRQAPGKGLEWVTFISYDGNNKYYADSVKGRFTISRDNSKNTLYLQMNSLRAEDTAIYYCARTGWLGPFDYWGQGTLVTVSTAKTTPPSVYPLAPRS

SEQ ID NO: 581 - DNA, 855 bp, Artificial Sequence
  Description of Artificial Sequence: Synthetic polynucleotide
atggaaaccgatactttgcttctatgggtccttttgctatgggtgcccggatcaaccggaataagacgtgctgatatcgttatgacccagaccacgctatcattaccagttagtctaggtgaccaggccagtatcagttgccgttcatctcagtccattgtacactcaaacggaaacacctacttggagtggtatcttcagaaacctggtcaatctcccaagcttctaatttacaaagtgtctaaccgattttctggtgtgccggatcgattttcgggttctggtagtggaacggatttcacgctaaaaatatcccgagtcgaagctgaagacctaggagtatattattgctttcaaggatctcacgtcccgtacacctttggtggaggaaccaagcttgaaataaagcgaggaggtggaggatcaggaggaggtggttcgggtggtggtggttccgaggcgaagttacaggagtcgggacccgtattagtgaagcctggtgcgagtgtcaaaatgagttgcaaagccagtggttacaccttcacagactattacatgaactgggtgaagcagtctcacggaaaatctttagagtggataggagtaattaacccgtacaatggtgatacgagttacaaccagaagttcaaaggtaaggcgaccttgacggtcgataaatcctctagtactgcgtacatggaactaaactctttaacctctgaggattctgccgtatattattgtgccagatattatggttcgtggttcgcatattggggacagggaactttaattacggtctcgacagccaaaacgactcccccctcagtttatccccttgctcctagaagttaa

SEQ ID NO: 582 - protein, 284 aa, Artificial Sequence
  Description of Artificial Sequence: Synthetic polypeptide
METDTLLLWVLLLWVPGSTGIRRADIVMTQTTLSLPVSLGDQASISCRSSQSIVHSNGNTYLEWYLQKPGQSPKLLIYKVSNRFSGVPDRFSGSGSGTDFTLKISRVEAEDLGVYYCFQGSHVPYTFGGGTKLEIKRGGGGSGGGGSGGGGSEAKLQESGPVLVKPGASVKMSCKASGYTFTDYYMNWVKQSHGKSLEWIGVINPYNGDTSYNQKFKGKATLTVDKSSSTAYMELNSLTSEDSAVYYCARYYGSWFAYWGQGTLITVSTAKTTPPSVYPLAPRS

SEQ ID NO: 583 - DNA, 1734 bp, Artificial Sequence
  Description of Artificial Sequence: Synthetic polynucleotide
  misc_feature (1654)..(1716): B7-1 transmembrane domain
  misc_feature (1654)..(1731): B7-1 cytoplasmic domain
atgtgtcaccagcagttggtcatctcttggttttccctggtttttctggcatctcccctcgtggccatatgggaactgaagaaagatgtttatgtcgtagaattggattggtatccggatgcccctggagaaatggtggtcctcacctgtgacacccctgaagaagatggtatcacctggaccttggaccagagcagtgaggtcttaggctctggcaaaaccctgaccatccaagtcaaagagtttggagatgctggccagtacacctgtcacaaaggaggcgaggttctaagccattcgctcctgctgcttcacaaaaaggaagatggaatttggtccactgatattttaaaggaccagaaagaacccaaaaataagacctttctaagatgcgaggccaagaattattctggacgtttcacctgctggtggctgacgacaatcagtactgatttgacattcagtgtcaaaagcagcagaggctcttctgacccccaaggggtgacgtgcggagctgctacactctctgcagagagagtcagaggggacaacaaggagtatgagtactcagtggagtgccaggaggacagtgcctgcccagctgctgaggagagtctgcccattgaggtcatggtggatgccgttcacaagctcaagtatgaaaactacaccagcagcttcttcatcagggacatcatcaaacctgacccacccaagaacttgcagctgaagccattaaagaattctcggcaggtggaggtcagctgggagtaccctgacacctggagtactccacattcctacttctccctgacattctgcgttcaggtccagggcaagagcaagagagaaaagaaagatagagtcttcacggacaagacctcagccacggtcatctgccgcaaaaatgccagcattagcgtgcgggcccaggaccgctactatagctcatcttggagcgaatgggcatctgtgccctgcagtgttcctggagtaggggtacctggggtgggcgccagaaacctccccgtggccactccagacccaggaatgttcccatgccttcaccactcccaaaacctgctgagggccgtcagcaacatgctccagaaggccagacaaactctagaattttacccttgcacttctgaagagattgatcatgaagatatcacaaaagataaaaccagcacagtggaggcctgtttaccattggaattaaccaagaatgagagttgcctaaattccagagagacctctttcataactaatgggagttgcctggcctccagaaagacctcttttatgatggccctgtgccttagtagtatttatgaagacttgaagatgtaccaggtggagttcaagaccatgaatgcaaagctgctgatggaccctaagaggcagatctttctagatcaaaacatgctggcagttattgatgagctgatgcaggccctgaatttcaacagtgagactgtgccacaaaaatcctcccttgaagaaccggatttttataaaactaaaatcaagctctgcatacttcttcatgctttcagaattcgggcagtgactattgatagagtgatgagctatctgaatgcttccggaggaggtggatcgggtggtggaggatctggtggaggtggaagtctgctcccatcctgggccattaccttaatctcagtaaatggaatttttgtgatatgctgcctgacctactgctttgcctaa

SEQ ID NO: 584 - protein, 577 aa, Artificial Sequence
  Description of Artificial Sequence: Synthetic polypeptide
  MISC_FEATURE (552)..(572): B7-1 transmembrane domain
  MISC_FEATURE (552)..(577): B7-1 cytoplasmic domain
MCHQQLVISWFSLVFLASPLVAIWELKKDVYVVELDWYPDAPGEMVVLTCDTPEEDGITWTLDQSSEVLGSGKTLTIQVKEFGDAGQYTCHKGGEVLSHSLLLLHKKEDGIWSTDILKDQKEPKNKTFLRCEAKNYSGRFTCWWLTTISTDLTFSVKSSRGSSDPQGVTCGAATLSAERVRGDNKEYEYSVECQEDSACPAAEESLPIEVMVDAVHKLKYENYTSSFFIRDIIKPDPPKNLQLKPLKNSRQVEVSWEYPDTWSTPHSYFSLTFCVQVQGKSKREKKDRVFTDKTSATVICRKNASISVRAQDRYYSSSWSEWASVPCSVPGVGVPGVGARNLPVATPDPGMFPCLHHSQNLLRAVSNMLQKARQTLEFYPCTSEEIDHEDITKDKTSTVEACLPLELTKNESCLNSRETSFITNGSCLASRKTSFMMALCLSSIYEDLKMYQVEFKTMNAKLLMDPKRQIFLDQNMLAVIDELMQALNFNSETVPQKSSLEEPDFYKTKIKLCILLHAFRIRAVTIDRVMSYLNASGGGGSGGGGSGGGGSLLPSWAITLISVNGIFVICCLTYCFA

SEQ ID NO: 585 - DNA, 774 bp, Artificial Sequence
  Description of Artificial Sequence: Synthetic polynucleotide
  misc_feature (691)..(771): transmembrane and cytoplasmic domain
atgtgtcagtctcgataccttcttttcctagcaaccttagcgttattgaatcatctttcattagcgcgtgtcattccggtctccggtcccgcccgttgcctttcgcaaagtcgtaacttgcttaagactacggatgatatggtcaaaactgctagagaaaagttaaaacactactcgtgtacggctgaagacatagaccacgaagacatcacgcgagatcaaacaagtaccctaaagacttgcttaccgctagagcttcataaaaacgagagttgcctagcgacccgagagacatcttcaacaaccagaggatcttgtctaccccctcagaagacttctctaatgatgaccttgtgccttggtagtatatatgaagatttaaagatgtaccagactgaatttcaggcaatcaatgcggcattacaaaaccacaaccatcagcagataatattagataaaggaatgcttgtagccattgacgaacttatgcagtctctaaaccacaacggtgagacacttcgtcagaaacctccggttggtgaggcagatccttaccgtgtgaaaatgaagttgtgcattctattgcatgcattttcgacgcgtgtggtcaccatcaacagagtcatgggttatctaagttctgctggtggaggtggaagtggaggtggaggaagtggtggaggaggaagtaccttagtgttgtttggagcaggtttcggtgcagtcataacggttgtcgttatcgtggtgatcataaaatgtttctgcaagtga

SEQ ID NO: 586 - protein, 257 aa, Artificial Sequence
  Description of Artificial Sequence: Synthetic polypeptide
  MISC_FEATURE (231)..(257): transmembrane and cytoplasmic domain
MCQSRYLLFLATLALLNHLSLARVIPVSGPARCLSQSRNLLKTTDDMVKTAREKLKHYSCTAEDIDHEDITRDQTSTLKTCLPLELHKNESCLATRETSSTTRGSCLPPQKTSLMMTLCLGSIYEDLKMYQTEFQAINAALQNHNHQQIILDKGMLVAIDELMQSLNHNGETLRQKPPVGEADPYRVKMKLCILLHAFSTRVVTINRVMGYLSSAGGGGSGGGGSGGGGSTLVLFGAGFGAVITVVVIVVIIKCFCK

SEQ ID NO: 587 - DNA, 1743 bp, Artificial Sequence
  Description of Artificial Sequence: Synthetic polynucleotide
  misc_feature (1660)..(1740): transmembrane and cytoplasmic domain
atgtgcccccaaaagttgaccatctcatggttcgcaattgtactactagtgagtcccttgatggcaatgtgggagcttgaaaaggacgtctatgtggtggaggttgactggacgcccgatgcgccaggagaaacagtgaatctaacttgcgacacacctgaagaggatgacataacgtggacatctgatcaaagacatggtgtgataggttctggtaagacacttacgattaccgtcaaggaatttttggacgctggacaatacacttgtcacaaaggaggtgaaacactatcgcattcacacctacttttacacaagaaggaaaatggtatttggagtacggagatcctaaagaattttaaaaataagacctttttaaagtgcgaagcaccaaattattccggacgatttacatgttcatggttagttcaacgaaatatggatttaaaattcaatatcaagtcaagttctagttccccggattcccgagcggttacttgcggtatggccagtttgagtgccgagaaagtcacactagaccagcgagattatgagaaatattccgtttcctgccaggaggacgtaacttgtccgactgccgaggagactttgccgatagagcttgccttagaggcccgacagcagaataagtacgagaattactctacctcttttttcatccgagacatcatcaaacctgacccaccaaagaatttgcaaatgaaacccttaaaaaactcacaggtggaggtgtcctgggaatatcctgactcttggtctaccccccattcttacttttcccttaagttcttcgttagaatacaacgtaaaaaagagaagatgaaagaaacggaagaaggttgcaaccagaaaggagcatttctagttgaaaagacctctacggaagtccagtgtaaaggtggaaatgtgtgtgtgcaagcccaggaccgatattacaacagttcgtgttcgaagtgggcttgcgtgccgtgtcgtgtccgatctgtaccaggagtcggagttcctggagtaggtcgtgtaataccggtatccggaccagctcgttgcttatctcaatcgcgaaacctacttaaaacaaccgatgacatggtgaagacagcgagagaaaagcttaaacattattcctgtaccgccgaagacatcgatcatgaggatatcacgagagaccagacctcgacacttaagacatgcttgccactagaacttcataaaaatgagtcttgcttagcaacgcgagaaacgtcgtctacgacgcgtggttcatgtttgccgccccaaaagacatccttgatgatgacgttgtgtcttggatccatctatgaggatttaaaaatgtaccagacagaatttcaggctatcaatgcagctctacagaatcataatcaccagcagattatcttagacaagggaatgttagtagcaatcgatgagcttatgcaatccttgaatcataacggagaaacattacgacaaaagcctccggtcggtgaagcggatccatatcgtgtgaagatgaaattatgtatattgttgcacgcctttagtacgcgtgtggtcaccataaaccgagtaatgggatacttgtcctcggcgggaggtggtggttctggtggaggtggatcaggtggtggtggttcaaccttggttctttttggtgcgggtttcggtgccgtgattactgtcgtcgtcatagtcgtcattattaaatgtttttgtaagtaa

SEQ ID NO: 588 - protein, 580 aa, Artificial Sequence
  Description of Artificial Sequence: Synthetic polypeptide
  MISC_FEATURE (554)..(580): transmembrane and cytoplasmic domain
MCPQKLTISWFAIVLLVSPLMAMWELEKDVYVVEVDWTPDAPGETVNLTCDTPEEDDITWTSDQRHGVIGSGKTLTITVKEFLDAGQYTCHKGGETLSHSHLLLHKKENGIWSTEILKNFKNKTFLKCEAPNYSGRFTCSWLVQRNMDLKFNIKSSSSSPDSRAVTCGMASLSAEKVTLDQRDYEKYSVSCQEDVTCPTAEETLPIELALEARQQNKYENYSTSFFIRDIIKPDPPKNLQMKPLKNSQVEVSWEYPDSWSTPHSYFSLKFFVRIQRKKEKMKETEEGCNQKGAFLVEKTSTEVQCKGGNVCVQAQDRYYNSSCSKWACVPCRVRSVPGVGVPGVGRVIPVSGPARCLSQSRNLLKTTDDMVKTAREKLKHYSCTAEDIDHEDITRDQTSTLKTCLPLELHKNESCLATRETSSTTRGSCLPPQKTSLMMTLCLGSIYEDLKMYQTEFQAINAALQNHNHQQIILDKGMLVAIDELMQSLNHNGETLRQKPPVGEADPYRVKMKLCILLHAFSTRVVTINRVMGYLSSAGGGGSGGGGSGGGGSTLVLFGAGFGAVITVVVIVVIIKCFCK

SEQ ID NO: 589 - protein, 5 aa, Artificial Sequence
  Description of Artificial Sequence: Synthetic peptide
PRGSG

SEQ ID NO: 590 - DNA, 191737 bp, Vaccinia virus
gtaaaattaaattaattataaaattatgtatatgatttactaactttagttagataagttagtaatacataaattttagtatattaatattatattttaaatatttatttagtgtctagaaaaaaatgtgtgaccaacgaccgtaggaaactctagagggtaagaaaaatcaatcgctttatagagaccatcagaaagaggtttaatatttttgtgagaccatcgaaggagaaagagataaaacttttttacgactccatcagaaagaggtttaatatttttgtgagaccatcgaaggagaaagagataaaacttttttacgactccatcagaaagaggtttaatatttttgtgagaccatcgaaggagaaagagataaaacttttttacgactccatcagaaagaggtttaatatttttgtgagaaaggagaaagagataaaacttttttacgactccatcagaaagaggtttaatatttttgtgagaccatcgaaggagaaagagataaaacttttttacgactccatcagaaagaggtttaatatttttgtgagaccatcgaaggagaaagagataaaacttttttacgactccatcagaaagaggtttaatatttttgtgagaccatcgaaggagaaagagataaaacttttttacgactccatcagaaagaggtttaatatttttgtgagaccatcgaaggagactccatcagaaagaggtttaatatttttgtgagaaaggagaaagagataaaacttttttacgactccatcagaaagaggtttaatatttttgtgagaaaggagaaagagataaaacttttttacgactccatcagaaagaggtttaatatttttgtgagaccatcgaaggagaaagagataaaacttttttacgactccatcagaaagaggtttaatatttttgtgagaccatcgaaggagaaagagataaaacttttttacgactccatcagaaagaggtttaatatttttgtgagaccatcgaagagagaaagagataaaacttttttacgactccatcagaaagaggtttaatatttttgtgagaccatcgaagagagaaagagataaaacttttttacgactccatcagaaagaggtttaatatttttgtgagaccatcgaagagagaaagagataaaacttttttacgactccatcagaaagaggtttaatatttttgtgagaccatcgaagagagaaagagataaaacttttttacgactactccatcagaaagaggtttaatatttttgtgagaccatcgaagagagaaagagataaaacttttttacgactccatcagaaagaggtttaatatttttgtgagaccatcgaagagagaaagagataaaacttttttacgactccatcagaaagaggtttaatatttttgtgagaccatcgaagagagaaagagataaaacttttttacgactccatcagaaagaggtttaatatttttgtgagaccatcgaagagagaaagagataaaacttttttacgactccatcagaaagaggtttaatatttttgtgagaccatcgaagagagaaagagataaaacttttttacgactccatcagaaagaggtttaatatttttgtgagaccatcgaagagagaaagagataaaacttttttacgactccatcagaaagaggtttaatatttttgtgagaccatcgaagagagaaagagataaaacttttttacgactccatcagaaagaggtttaatatttttgtgagaccatcgaagagagaaagagataaaacttttttacgactccatcagaaagaggtttaatatttttgtgagaccatcgaagagagaaagagataaaacttttttacgactccatcagaaagaggtttaatatttttgtgagaccatcgaagagagaaagagataaaacttttttacgactccatcagaaagaggtttaatatttttgtgagaccatcgaagagagaaagagataaaacttttttacgactccatcagaaagaggtttaatatttttgtgagaccatcgaagagagaaagagataaaacttttttacgactccatcagaaagaggtttaatatttttgtgagaccatcgaagagagaaagagataaaacttttttacgactccatcagaaagaggtttaatatttttgtgagaccatcgaagagagaaagagataaaacttttttacgactccatcagaaagaggtttaatatttttgtgagaccatcgaagagagaaagagataaaacttttttacgactccatcagaaagaggtttaatatttttgtgagaccatcgaagagagaaagagataaaacttttttacgactccatcagaaagaggtttaatatttttgtgagaccatcgaagagagaaagagataaaacttttttacgactccatcagaaagaggtttaatatttttgtgagaccatcgaagagagaaagagataaaacttttttacgactccatcagaaagaggtttaatatttttgtgagaccatcgaagagagaaagagataaaacttttttacgactccatcagaaagaggtttaatatttttgtgagaccatcgaagagagaaagataaaacttttttacgactccatcagaaagaggtttaatatttttgtgagaccatcgaagagagaaagagataaaacttttttacgactccatcagaaagaggtttaatatttttgtgagaccatcgaagagagaaagagataaaacttttttacgactccatcagaaagaggtttaatatttttgtgagaccatcgaagagagaaagagaaagagatagttagtctagatatttttcttagtacaaaagtcaatgttttaaaatatatggacaagaatttgtctgtataaaaacttgtgtgaaattttgtaccaaagaaaaaatgtgagcagtatcccctacatggattttactagatcatttatataccaaaaaatattatacgatctacgttttattatatgattttaacgtgtaaattataaacattattttatgatatacaattgtctggtaacctagatgggcataggggatgttgataagctcgacgagtatatgttgttggacgttattgtttaagaaatagttgatgcatcagaaagagaataaaaaatattttagtgagaccatcgaagagagaaagagataaaacttttttacgactccatcagaaagaggtttaatatttttgtgagaccatcgaagagagaaagagaataaaaatattttatgactccattgaagagagaaagagaaaatgagaatgagaataaaaatattttagtgacaccatcagaaagaggtttaatatttttgtgagaccatcgaagagagaaagagaataaaaatattttatgactccattgaagagagaaagagaaaatgagaatgagaataaaaatattttagtgacaccatcagaaagaggtttaatattttttatgagaccatcaaagagagaaagagaataaaaatatttttgtaaaactttttttatgagaccatcaaagagagaaagagaataaaaatatttttgtaaaactttttttgtgagaccatcgaagagagaaagagaataaaaatatttttgtaaaactttttttatgagaccatcaaagagagaaagagaataaaaatatttttgtaaaactttttttatgagaccatcaaagagagaaagagaataaaaatatttttgtaaaactttttttatgagaccatcaaagagagaaagagaataaaaatatttttgtaaaactttttttatgagaccatcaaagagagaaagagaataaaaatatttttgtaaaactttttttatgagaccatcaaagagagaaagagaataaaaatatttttgtaaaactttttttatgagaccatcaaagagagaaagagaataaaaatatttttgtaaaactttttttatgagaccatcagaaagaggtttaatatttttgtgataccctgaaaggaaataggaataggaataggaatagtgtcataatcgtatcacactattgagacagaaaaagaagaagtaacgagaggtaactttttgtgaatgtagttaagaacatttttgttttgcaaaccggaatatagtgtccggtacacttttttaattcgtggtgtgcctgaatcgttcgattaaccctactcatccaatttcagatgaatagagttatcgattcagacacacgctttgagttttgttgaatcgatgagtgaagtatcatcggttgcaccttcagatgccgatccgtcgacatacttgaatccatccttgacctcaagttcagatgattccttgcacatgtctccgatacgaacgctaaactctagattcttgacacattttgtatcgacgatcgttgaaccgatgatatcttcgtaactcactttcttatgagagatgttagacccgagtactggatgggtcttgatgtcgctgtctttctcttcttcgctacatctgatgtcgatagacacctcacagtctttgatcatagccagagcttcttcacgagtgatcgcgggagagtccttaccttgtcctggggacacgctggacaatctagcattcactgtgtttccatcagcggattctgagatggatttaatctgaggacatttggtgaatccaaagttcattctcagacctccaccgatgatggagtaataagtggtaggaggatctacatcctcgactgatgtggaatcatcttctgattccacctcgggatctggatctgactcggactctgtaatttccgttacggattggcaaatcttatcattggtcggtgtttggtcttgctttgtgactttgataataacatcgattcccatatgatgtttgttttcttcttccgtacacgaggaggaggatgaggatgattgctgaagactggcaggcacatgcatgccaggacgatatattgtttcataattgctattgattgagtactgttctttatgattctacttccttaccatgcaataaattagaatatattttctacttttacgagaaattaattattgtatttattatttatgggtgaaaaacttactataaaaagcgggtgggtttggaattagtgatcagtttatgtatatcgcaactaccgggcatatggctatcgacatcgagaacattacccacatgataagagattgtatcagtttcgtagtcttgagtattggtattactatatagtatatagatgtcgacgctagatatacagtctccgaatgcggcatgataccgtcatcattctttgctttcgttaactgtttggaggaagaatctttgttattgcatttaatctcgaaattcagagtgcacacctttctcctgtaaagaatcctgaagtcgctaccttattaagaacggagaagtatccatcacgaaatacgggattacagtctttatgattcatagtaatagttagttccgacgttgagatggattcactgagaccggtagtggtcgtccgagtacacgacgtgtcgttgacgggatacagattaatttccacatcgatatagttaaaggtatttctgggtacgggttcgcatttatctgcggaagagacggtgtgagaatatgttccgagaccacacggagaacagatgacgtctccggatactccgtatcctattccacattttgtttgggaaacacatgccttgcatccggatgatcctttgagaagacaataatatccgggagagcattcacagattctattgtgagtagtgttacacgatcgcgtcttccgttacaacttagacaagcgggtaaatgattattgcgagatgtgaaggtacccgaaccacacggcgtacattgtgtgttagtcttgctatcgcataatctggaagcgtatgttcccggacacaaattatggcgtttgtattcgttgtctttacactttccatcggatggtgcatgcggtgctatatctcttccgtttattattatacatgagagaaacaatatatacgagtataatacggacttcataatttaataatgtagtaatcgttgtcgtgttcctgtttcctacttctccaatcatatagatattttctttctatcatggataatatttgtaatggttctttccgtacaacatactgtttagatgatattgcgcataatttccggaggcaaatacgatagtctagattgaccgatggtagactctaatttattgagtgctttgtcgacgagtttacttttacgctccatcgatagatggcactgttctatgagatcgtcgtacatgggaaatgaaatgtgtctgtccgaatgtatggcttcaagatagctgtgataccgtatacaggtcggtgtcggagattcgaatctctttgaggcgacttatgtcacgatgatggaatctatcttatcgaatgatatatttttcataaatacacttttatagtcctcgtttaaacagaatttactatgtagttccgcgaatgactcgtcccttaataggcagtaggctagtatcttttttacgtagtaatcgtcgtagggagagaattctgacatcttgtagaacaacgatttaatcataggtagagatactttcagtctgtggtggatgatgtcattcacaacatccgccttgtatatgatgtttctgttttcaaacaccaagtcgaataccgtctttagtcggaaggttgatgtcgtatccgatgtatgaggcaacattgttgttacaattttgaaaggcggtatatgtattcgtctttctgaatgtcgaacctatctagtagataccgtagtatattgagagtgtatccttgattatgttttatgaatagataaagtagatgttgtccttcttccttttgttcgtgccaattgagtaacattatgagaatatgacctgttgcacaatcgttccatgatgggtgtacaatcaagattattacgtatcctcgagataaaagagcatacaccacacgaggactatgtttggtatactgttgaaggtaagtgtgtaaccgcgttaatgtttgctccataatctattatcgcgtagatgaatcgcttctcggctcgcatcttagtgtgacttaacttgtaataattgcttttgtagaacgtggatatgtgtttacagtagtaatgaagagaagtgagttcatcctcgtcggcgcaattagggtcggatcctttgtacagaacgtagtagtttaagctcccattgaatttatatctaagataacacagcaatagatcggatgatttactaaagtcatcaatggtgtccgttagtatatcaaagatcttgttatcgattgatagtgaatgaatcagatagtggtgtcctttttcatccttgctatcaaagttacgcatgccgtggtgtaacaatatctttaatacagatggattaaatcgtgtattcatcgtatagcaatgtaatggagagttacctcgtttattcagatcgcagtgtttaataactagcttaaacagatgagacgatgtatccacatcaaagaacgtaaaatacatatgacaaacattgttgacagaaacgtgaccttcattcttaccgtcgtccataaatacgttaggtatgtaccacatactgtcgcgaacgatgctcacaatctcgtccatctcgcccatctcatacatttcatcatttactttttcataattagagatgtacgaaagaaaaagaaaaagaaaaagaaaaacagaacaatatatttttttagtaatgtttatgcgagacatataaaataaactccgtgtttatgatgccggtaaatgtttttatcatcttggacggaatcgattttgtaatatgtcatggaaacaaatgaaacaggacattatcactccatgataaattatttaatggagtaataaagtatctccatgggtaatttcgaaatcaagttatcgtctgtattaatgttgtccactatggagtcgatcctctcactgttctttacagtttctgtaatgatggacgttagttcttttttgtaccatttgatgtcggattctttgcgtatctcagtctgtggcgtttgcttcgtttaaataatatatcaaacatggagacgcctgatatgtaggcattcttcattctattaatgtctactctatagcgctttagttccttatgatgaccggcgatatcatacttactttagaaggaaaatcatcatctaggattaaggcgtatctgatacaggcgaataatggttcaggatatagatagcgtatatctctattaaatgcgtcaatcatagtctctagagtgggatggtagctaagtaataaatcaactatcctcgttttgttttctctttggtaactgcttttctggatggccgtattgattatcgagcgtgatgttgtaacactcgctccatattccaataaccgctttgcaaattgtatattattgacatcgaccgcgtaatatagtagagttttattctcattatcgatcatatctatatcatccatgtacttgcttagtatatcaaatacatctattagtatggtttcataacagtgatacccgcaattattaaatctcgataatatcagaccgtacatacatagacggccattgttagatatgtgatttacagccgcgtgtccatattttccacgataaaccttacgacgtttacatcgacgagattattattaacaaagtagtcgtgcagaggatagttgttgtccgttatctaacatgcatcgaacgaccatatcgccgtaatgtaagtagtttatcaacatggcttgtacgatggattcatcctgttgtctaaatctctttagaatgttatcgatgatgtagtggttatattctctggaatcgtacgaagtaatactacgcattacgtcgacaagagtatgacgtctctcaataagaagattaacgatttccatgtctacattatatggggttactctaaatcgcttgtttagataatacgcctctaatatagggctgacgtcgtatactctacacgtgtccacatcctttattaataataatttaacaatctctatatctatggttgagaaagaccagtagtattggatgggtaaagatcctccttcgtctctgccatggatggaaacattgttattgatcaaacatttaattacatccttggatagagattgagattctctatgagacgatatatagtaatgaagagagttcttacacatatcactgttgtacatacaggtacgaaatacgtaaccggtgctgtaacattctgatttaagaagccatagcaatacttctggtctcggattaggcgtcgttacgtatatatccaccaatccgagaccattgattgcataattcgtattcttggacggacgtatccgtttatccacaattaggtattttagcagacgtaagtcgatattatccgaagacagatcgaaatcatttatattcgacttgagttcgttagaggaattcgaatagctggatatcagtagatgcacaatctgagattttacgtatctatgcttactgtatgctcctagcggagttaatccttcgttgtttctacaaagtctctcgactccgcgagagagtaacagtcgaacaatcttaatgtctgtatcgcatttattggagacgtaacaatgtagcgcattgtttcctcgtctatctatatgttttgataagttgtgacacgtttcaatctctagttttatttttttgtacgtcacatcttcatccagtagacgacatagaatagtgcactctctaccacaataatccatagctattctggtgctaattattcctatttcacgaaaaatgatgaaggcaatcattcctcataagatgataaaaagtgtagtgagagagcatgaaggagatttagtatttagcagtgcggatatgatccaagagggtgagatagtcgttctcgttcagaatctttcgcagcataagtagtatgtcgatatacttatcgttgaagactcttccagagacgatagctgattgagtacaaagtccaatgattgcacgaagttcttcggcggttttcatggagtcatttctgatgaaacatttaatgatctccacgcaattgtcgatattgtcccacggaagtgaatccttcaactcaccaccaaagagctccgttgcatcagttctgaaagagatgagaagcctgtagagagaccctgcgctttctctatgggtccatctatgagaaacccacaggatgtattcagtcagacaatgtctgacgtcggccacggtattcagggagtccttagtagcgtggcaatgacagggtctgaactgggcacaaggaaaggccattgtaaaggtagacctgtagccgtttatgctaatagagggctttaatttccatttttttaatgggttgtggatgaggaatgagagtgatatcatattgagatacgtagttatgtagaggtgtatttcctatattatttactttcggtttcatattttaccaactctttaataaatttcttttcacgatgcatcttattgaatgacgttttctcataagtggacatatagatgcagaagtaatgaagaaaagtattacctctatcatctacataattagggtctgctcctttttttaacaacttatacagtacgtagtagtagtttatcggttttaaatcaagtctagaatatatagtggattaatatatttttatattagctaaagctatctatactatcagaaagcatatcattctcaacttcatcatgagttaaatatttgtgtaatggatgtcatgaacattaaacgtattcatgacatactcctttaataggttttttaaaacagatgattcaaatccttcattcattagataacagtgtaacggagtcgtaccttctactagtttgtttatatcacagcattctacaaacagtctaaacaatagagaagacggacagactttaacgtataaatgacacatgttatcgatattcgttgatgaattattattaaacgtagttatgataaatgattctaacgacatctctcgctagagataaaatctagtatcgtatcattaaacatctttgcatcatactcgcatagcatagtttttcataattaatacaatatttaaaagacttattcggaaagtattttaatacatgtatcatcgatggagatccatatgaggagtcacttgtagttcttcagtagtaataacagtgctatcatcgatagtataattatatgtagaaggttcatatgttgttgtaattggagtaactgttggtagttcttccgtggaatcaataattatactaacagcaatagtataattatataaatatgttccgttgatatcacatattttaatgaactcatttctaacaccctcagctatatctgtccaattaaatgtagccaacaatctactacgttctctttgattgactacttgtacggtagcgacgctacactatctttattgtcttctacatgctccaattgaatgtcatgatacaacgcagtttttcttatgcatgtttcataacaccacgaacatgtcgcagtaagatatatagccagagataatttctgtaaattcatgattgccggtcataaacaagcccgtcaataattgtggctatatattcagtttatagagcaaaataattaagcacaatagcgcttaatctcaaaatatgttatgtttatttttttcatattaaacatactggttaaaatcctctaaaggctgatcttcatctataaatcaagatcataattacatttagacagtggtttcatgtttataaaaatgttctttttgtgtgaataaggaatatactaatcaataatcaaccatcgaccccattacgatagtatgcaggcaacccccattagagaggtacgtgtaatcagtctctccagttttagtatttttataagtcattgttacataaacggcttttaaacagtctcctcgataataagccatatctggaaatttattaaatactcgagtcattttacgcacggtcaaaaaagtaagtaatgtcgacgacttcttacattctatagaaacacctagaatactcattttcttttggaaaatatcctcagactctgatttgaacaatgcacgacctatagtaaaccgtgaccaataagttatattagtcaatggtatatccaaaccatcaggtgtggatagtccagtctttggtatcgatagtgtagttattgaactgagaagttaccgtatagtctttttggtcatctctaaacaaggaaactaatacctctacactattgaacgatttatcttccgtaatgggtggactagcgatggatgaagtcacgaatataagacacgctattaatccgtatatcatcattttgatattacttataataacgatttgtttaatttttagtttatactattaattgtaaatgatattattatttttttaagtattatcagctttagtttatactattactatttgtaatatttagacatagataaacgtgataaaagtctatttgtttatatttattgcggatagcagtatttccctataaaaagtatacgtcctgtggtgtctttaatcatgtacatgaatggatggtttatgtagaccttcgtacgatataccatcgaaaagttaatcgtaaatactcctgtaacggccgatgcttctgtatactcctcattaacatctataaacgtcgtatgtagaaatttttctacagtgatagtttcattacacatcttgctaaaatctgcataatatccgaatatattagtaagtcctaaattttctaaaatcggtaccagattatacggttctgtcatttccactttaaactttggcatatacaagtctatacttttagtagataacataccacaccattttttaaatttttcatctgttatatttttttctatgttatatataccttctatgtcgtccggtagtataatcaccatactagagtttccctcgtatggaatatcgataatagagaatcctccgaataattcattaatatgtacatattgcaagttattctcggtacccaccatcatatcaacactggtaactatattcttagaaatataaaacttgtctgtatatgtaagatgtttagaaaatggatatttccacattgctttaaaatggacggcgctaacaactgtcatacgagtattaatggatagcggactagtcaataaggaattaattttaccatttgtcattgtcttaacccattcgttgattagttcctttgtttggttagcattattaaagtttacagtttgaaaatcgtcttttattttttgtaggaaggaggcgtggaactcgatactatcgctaccgtatattttatttgcggtagctagtgtcgcacaatacggaatatctacgtccatgtcattattgtcatcgggtgtattctcattcatattctctatatattttgatagttgttcagctgtagaaccagctgctccatgatttagaatagataaagtagataaaatagaaactggagaaatcaaaacattttcatcagggtgttttacgattagttctttaaagatatccatggtatagaccaaacaataacgataacgatatatatcataaataaataatgttaaatttcagtttatgtttgtaccccgtattcatacttaacaaattggtattgcgtacacaatcaatcatattacataccattaataatgcaagcataaaaaatcgttagtagatgtttctaaatataggttccgtaagcaaagaatataagaatgaagcggtaatgataaaatcaatcgttatctaaaatgatcatactcatttattttattctattatattaacacatacatttttaacagcaacacattcaatattgtattgttatttttatattatttacacaattaacaatatattattagtttatattactgaattaataatataaaattcccaatcttgttataaacacacactgagaaacagcataaacacagaatccatcaaaaatgtcgatgaaatatctgatgttgttgttcgctgctatgataatcagatcattcgccgatagtggtaacgctatcgaaacgacattgccagaaattacaaacgctacaacagatattccagctatcagattatgcggtccagagggagatggatattgtttacacggtgactgtatccacgctagagatatcgacggtatgtattgtagatgctctcatggttatacaggcattagatgtcagcatgtagtattagtagactatcaacgttcagaaaacccaaacactacaacgtcatatatcccatctcccggtattatgcttgtattagtaggcattattattattattacgtgttgtctattatctgtttataggttcactcgaagaactaataaactacctctacaagatatggttgtgccataatttttataaattttttttatgagtatttttacaaaaatgtataaagtgtatgtcttatgtatatttataaaaatgctaaatatgcgatgtatctatgttatttgtatttatctaaacaatacctctacctctagatattatacaaaaattttttatttcagcatattaaagtaaaatctagttaccttgaaaatgaatacagtgggtggttccgtatcaccagtaagaacataatagtcgaatacagtatccgattgagattttgcatacaatactagtctagaaagaaatttgtaatcatcttctgtgacgggagtccatatatctgtatcatcgtctagtttatcagtgtcccatgctatattcctgttatcatcattagttaatgaaaataactctcgtgcttcagaaaagtcaaatattgtatccatacatacatctccaaaactatcgcttatacgtttatctttaacgatacctatacctagatggttatttactaacagacattttccagatctattgactataactcctatagtttccacatcaaccaagtaatgatcatctattgttatataacaataacataactcttttccgtttttatcagtatgtatatctatattaacgtcgtcgttgtagtgaatagtagttattgatctattatatgaaacggatatgtctagaacggcaattgttttacgtccagttaacactttctttgatttaaagtctagagtctttgcaaacataatatccttatccgactttatatttcctgtagggtggtataattttattttgcctccacatatcggtgtttccaaatatattactagacaatattccatatagttattagttaagggtacccaattagaacacgtacgcttattatcatcatttggatcgtatttcataaaagttattgtactatcgatgtcaacacattctacattttttaatcgtctatatagtatttttctgatattttctataatatcagaattgtcttccatcggaagttgtatactatcagaatcagttacatgtttaaataattctctgatgtcattccttatacaatcaaattcattattaaacagtttaatagtctgtagacctttatcgtcgtaaatatccattgtcttattagttacgcttatttttatgtgtttttacgttgctttattatattttataagaatgattgtttgacgaatcacgagaactattaagacatatattattagaggtatatattataaaaaagtttttgattacgatgttataagaggaaagaggacacattaacatcatacatcaattaactacattcttataacatcgtaatcaaaagaattgcaattttgatgtataacaactgtcaatgggttatggaattgtatattacatattatacagtatgttggtaacgacaaataccgatcggtaattgtctgccggtgtaatagaattatatatatctatctattacaccggctgagtacctacactattatatgattatagtttctatttttacagtaccttaactaaagtctctagtcacaagagcaatactaccaacctacactattatatgattatagtttctatttttataggaacgcgtacgagaaaatcaaatgtctaatttctaacggtagtgttgataaacgattatcgtcaatggatacctcctctatcatgtcgtctattttcttactttgttctattaacttattagcattatatattatttgattataaaacttatattgcttattagcccaatctgtaaatatcggattattaacatatcgtttctttgtaggtttatttaacatgtacatcactgtaagcatgtccgtaccatttattttaatttgacgcatatccgcaatttctttttcgcagtcggttataaattctatatatgatggatacatgctacatgtgtacttataatcgactaatatgaagtacttgatacatattttcagtaacgatttattattaccacctatgaataagtacctgtgatcgtctaggtaatcaactgttttcttaatacattcgatggttggtaatttactcagaataatttccaatatcttaatatataattctgctatttctggaatatatttatctgccagtataacacaaatagtaatacatgtaaacccatattttgttattatattaatgtctgcgccattatctattaaccattctactaggctgacactatgcgacttaatacaatgataaagtatactacatccatgtttatctattttgtttatatcatcaatatacggcttacaaagttttagtatcgataacacatccaactcacgcatagagaaggtagggaataatggcataatatttattaggttatcatcattgtcattatctacaactaagtttccattttttaaaatatactcgacaactttaggatctctattgccaaatttttgaaaatatttatttatatgcttaaatctatataatgtagctccttcatcaatcatacatttaataacattgatgtatactgtatgataagatacatattctaacaatagatcttgtatagaaactgtatatcttttaagaattgtggatattaggatattattacgtaaactattacacaattctaaaatataaaacgtatcacggtcgaataatagttgatcaactatataattatcgattttgtgatttttcttcctaaactgtttacgtaaatagttagatagaatattcattagttcatgaccactatagttactatcgaataacgcgtcaaatatttcccgtttaatatcgcatttgtcaagataataatagagtgtggtatgttcacgataagtataataacgcatctcttttttgtgtgaaattaaatagtttattacgtccaaagatgtagcataaccatcttgtgacctagtaataatataataatagagaactgttttacccattctatcatcataatcagtggtgtagtcgtaatcgtaatcgtctaattcatcatcccaattataatattcaccagcacgtctaatctgttctattttgatcttgtatccatactgtatgttgctacatgtaggtattcctttatccaataatagtttaaacacatctacattgggatttgatgttgtagcgtatttctctacaatattaataccatttttgatactatttatttctatacctttcgaaattagtaatttcaataagtctatatcgatgttatcagaacatagatattcgaatatatcaaaatcattgatatttttatagtcgactgacgacaataacaaaatcacaacatcgtttttgatattattatttttcttggtaacgtatgcctttaatggagtttcaccatcatactcatataatggatttgcaccactttctatcaatgattgtgcactgctggcatcgatgttaaatgttttacaactatcatagagtatcttatcgttaaccatgattggttgttgatgctatcgcattttttggtttctttcatttcagttatgtatggatttagcacgtttgggaagcatgagctcatatgatttcagtactgtagtgtcagtactattagtttcgatcagatcaatgtctagatctatagaatcaaaacacgataggtcagaagataatgaatatctgtacgcttctttttgtactgtaacttctcgttttgttagatgtttgcatcgtgctttaacatcaatggtacaaattttatcctcgctttgtgtatcatattcgtccctactataaaattgtatattcagattatcatgagatgtgtatacgctaacggtatcaataaacggagcacaccatttagtcataaccgtaatccaaaaatttttaaagtatatcttaacgaaagaagttgtatcatcgttaggatttggtaaatcattatctacagtgtatggtactagatcctcataagtgtatatatctagagtaatgtttaatttatcaaatggttgataatatggatcctcatgacaatttccgaagatggaaatgagatatagacatgcaataaatctaatcgaagacatggttactccttaaaaaaatacgaataatcaccttggctatttagtaagtgtcatttaacactatactcatattaatccatggactcataatctctatacgggattaacggatgttctatatacggggatgagtagttctcttctttaactttatactttttactaatcatatttagactgatgtatgggtaatagtgtttgaagagctcgttctcatcatcagaataaatcaatatctctgtttttttgttatacagatgtattacagcctcatatattacgtaatagaacgtgtcatctaccttattaactttcaccgcatagttgtttgcaaatacggttaatcctttgacctcgtcgatttccgaccaatctgggcgtataatgaatctaaactttaatttcttgtaatcattcgaaataatttttagtttgcatccgtagttatcccctttatgtaactgtaaatttctcaacgcgatatctccattaataatgatgtcgaattcgtgctgtatacccatactgaatggatgaacgaataccgacggcgttaatagtaatttactttttcatctttacatattgggtactagttttactatcataagtttataaattccacaagctactatggaataagccaaccatcttagtataacacacatgtcttaaagtttattaattaattacatgttgttttatatatcgctacgaatttaaacagagaaatcagtttaggaaaaaaaattatctatctacatcatcacgtctctgtattctacgatagagtgctactttaagatgagacatatccgtgtcatcaaaaatatactccattaaaatgattattccggcagcgaacttgatattggatatatcacaacctttgttaatatctacgacaatagacagcagtcccatggttccataaacagtgagtttatctttctttgaagagatattttgtagagatcttataaaactgtcgaatgacatcgcatttatatctttagctaaatcgtatatgttaccatcgtaatatctaaccgcgtctatcttaaacgtttccatcgctttaaagacgtttccgatagatggtctcatttcatcagtcatactgagccaacaaatataatcgtgtataacatctttgatagaatcagactctaaagaaaacgaatcggctttattatacgcattcatgataaacttaatgaaaaatgtttttcgttgtttaagttggatgaatagtatgtcttaataattgttattatttcattaattaatatttagtaacgagtacactctataaaaacgagaatgacataactagttatcaaagtgtctaggacgcgtaattttcatatggtatagatcctgtaagcattgtctgtattctggagctattttctctatcgcattagtgagttcagaatatgttataaatttaaatcgaataacgaacataactttagtaaagtcgtctatattaactcttttattttctagccatcgtaataccatgtttaagatagtatattctctagttactacgatctcatcgttgtctagaatatcacatactgaatctacatccaattttagaaattggtctgtgttacatatctcttctatattattgttgatgtattgtcgtagaaaactattacgtagaccattttctttataaaacgaatatatagtactccaattatctttaccgatatatttgcacacataatccattctctcaatcactacatctttaagattttcgttgttaagatatttggctaaactatataattctattagatcatcaacagaatcagtatatatttttctagatccaaagacgaactctttggcgtcctctataatattcccagaaaagatattttcgtgttttagtttatcgagatctgatctgttcatatacgccatgattgtacggtacgttatgataaccgcataaaataaaaatccattttcatttttaaccaatactattcataattgagattgatgtaatactttgttactttgaacgtaaagacagtacacggatccgtatctccaacaagcacgtagtaatcaaatttggtgttgttaaacttcgcaatattcatcaatttagatagaaacttatactcatcatctgttttaggaatccatgtattattaccactttccaacttatcattatcccaggctatgtttcgtccatcatcgttgcgcagagtgaataattcttttgtattcggtagttcaaatatatgatccatgcatagatcggcaaagctattgtagatgtgatttttcctaaatctaatataaaactcgtttactagcaaacactttcctgatttatcgaccaagacacatatggtttctaaatctatcaagtggtggggatccatagttatgacgcagtaacatatattattacattcttgactgtcgctaatatctaaatatttattgttatcgtattggattctgcatatagatggcttgtatgtcaaagatatagaacacataaccaatttatagtcgcgctttacattctcgaatctaaagttaagagatttagaaaacattatatcctcggatgatgttatcactgtttctggagtaggatatattaaagtctttacagatttcgtccgattcaaataaatcactaaataatatcccacattatcatctgttagagtagtatcattaaatctattatattttatgaaagatatatcactgctcacctctatatttcgtacatttttaaactgtttgtataatatctctctgatacaatcagatatatctattgtgtcggtagacgataccgttacatttgaattaatggtgttccattttacaacttttaacaagttgaccaattcatttctaatagtatcaaactctccatgattaaatattttaatagtatccattttatatcactacggacacaaagtagctgacataaaccattgtataatttttatgttttatgtttattagcgtacacattttggaagttccggcttccatgtatttcctggagagcaagtagatgatgaggaaccagatagtttatatccgtacttgcacttaaagtctacattgtcgttgtatgagtatgatcttttaaacccgctagacaagtatccgtttgatattgtaggatgtggacatttaacaatctgacacgtgggtggatcggaccattctcctcctgaacacaggacaccagagttaccaatcaacgaatatccactattgcaactataagttacaacgcttccatcggtataaaaatcctcgtatccgttatgtcttccgttggatatagatggaggggattggcatttaacagattcacaaataggtgcctcgggattccataccatagatccagtagatcctaattcacaatacgatttagattcaccgatcaaatgatatccgctattacaagagtacgttatactagagccaaagtctactccaccaatatcaagttggccattatcgatatctcgaggcgatgggcatctccgtttaatacattgattaaagagtgtccatccagtacctgtacatttagcatatataggtcccattttttgctttctgtatccaggtagacatagatattctatagtgtctcctatgttgtaattagcattagcatcagtctccacactattcttaaatttcatattaatgggtcgtgacggaatagtacagcatgatagaacgcatcctattcccaacaatgtcaggaacgtcacgctctccaccttcatatttatttatccgtaaaaatgttatcctggacatcgtacaaataataaaaagcccatatatgttcgctattgtagaaattgtttttcacagttgctcaaaaacgatggcagtgacttatgagttacgttacactttggagtctcatctttagtaaacatatcataatattcgatattacgagttgacatatcgaacaaattccaagtatttgattttggataatattcgtattttgcatctgctataattaagatataatcaccgcaagaacacacgaacatctttcctacatggttaaagtacatgtacaattctatccatttgtcttccttaactatatatttgtatagataattacgagtctcgtgagtaattccagtaattacatagatgtcgccgtcgtactctacagcataaactatactatgatgtctaggcatgggagacttttttatccaacgatttttagtgaaacattccacatcgtttaatactacatatttttcatacgtggtataaactccacccattacatatatatcatcgtttacgaataccgacgcgcctgaatatctaggagtaattaagtttggaagtcttatccatttcgaagtgccgtgtttcaaatattctgccacacccgttgaaatagaaaattctaatcctcctattacatataactttccatcgttaacacaagtactaacttctgattttaacgacgacatattagtaaccgttttccattttttcgtttcaagatctacccgcgatacggaataaacatgtctattgttaatcatgccgccaataatgtatagacaattatgtaaaacatttgcattatagaattgtctatctgtattaccgactatcgtccaatattctgtcctaggagagtaatgggttattgtggatatataatcagagtttttaatgactactatattatgttttataccatttcgtgtcactggctttgtagatttggatatagttaatcccaacaatgatatagcattgcgcatagtattagtcataaacttgggatgtaaaatgttgatgatatctacatcgtttggatttttatgtatccactttaataatatcatagctgtaacatcctcatgatttacgttaacgtcttcgtgggataagatagttgtcagttcatcctttgataattttccaaattctggatcggatgtcaccgcagtaatattgttgattatttctgacatcgacgcattatatagttttttaattccatatcttttagaaaagttaaacatccttatacaatttgtggaattaatattatgaatcatagtttttacacatagatctactacaggcggaacatcaattattacggcagcaactagtatcatttctacattgtttatggtgatgtttatcttcttccagcgcatatagtctaatagcgattcaaacgcgtgatagtttataccattcaatataatcgcttcatcctttagatggtgatcctgaatgcgtttaaaaaaattatacggagacgccgtaataatttccttattcacttgtataatttccccattgatagaaaatatcacgctttccattcttgaagtactataagtaattatagtataatgtaaaggtttatatattcaatattttttataaaaaaatcatttcgacattaattcctttttaaatttgcgtctatcatctatagaaacatattctatgaatttataaaatgcttttacgtgtcctatcgtaggcgatagaaccgctaaaaagcctatcgaatttctacaaaagaatctgttatatggtatagggagagtataaaacattaaatgtccgtacttattaaagtattcagtagccaatcctaactctttcgaatacttattaatggctcttgttctgtacgaatctatttttttgaacaacggacctagtggtatatcttgttctatgtatctaaaataatgtctgactagatccgttagtttaatatcctcagtcatcttgtctagaatggcaaatctaactgcgggtttaggctttagtttagtttctatatctacatctatgtctttatctaacaccaaaaatataatagctaatattttattacaatcatccggatattcttctacgatctcactaactaatgtttctttggttatactagtatagtcactatcggacaaataaagaaaatcagatgatcgatgaataatacatttaaattcatcatctgtaagatttttgagatgtctcattagaatattattagggttagtactcattatcattcggcagctattacttattttattatttttcaccatatagatcaatcattagatcatcaaaatatgtttcaatcatcctaaagagtatggtgaatgactcttcccatctaatttctgaacgttcaccaatgtctctagccactttggcactaatagcgatcattcgcttagcgtcttctatattattaactggttgattcaatctatctagcaatggaccgtcggacagcgtcattctcatgttcttaatcaatgtacatacatcgccgtcatctaccaattcatccaacaacataagctttttaaaatcatcattataataggtttgatcgttgtcatttctccaaagaatatatctaataagtagagtcctcatgattagttaacaactattttttatgttaaatcaattagtacaccgctatgtttaatacttattcatattttagtttttaggattgagaatcaatacaaaaattaatgcatcattaattttagaaatacttagtttccacgtagttaatgaaacatttgaactcatcgtacaggacgttctcgtacaggacgtaactataaaccggtttatatttgttcaagatagatacaaatccgataactttttttacgaattctacgggatccactttaaaagtgtcatacggggttctttttatttttttaaacagatcaatggtgtgatgttgattaggtcttttacgaatttgatatagaatagcgtttacatattctccataatggtcaatcgccatttgttcgtatgtcataaattctttaattatatgacactgtgtattgtttagttcatccttgttcattgttaggaatctattcaaaatggcaattatactagaactataggtgcgttgtatacacatattgatgtgtctgtttatacaatccatgatatttggatccatgctactaccttcgggtaaaattgtagcatcatataccatttctagtactttaggttcattgttatccattgcagaggacgtcatgatcgaatcataaaaaaatatattatttttatgttattttgttaaaaataatcatcgaatacttcgtaagatactccttcatgaacataatcagttacaaaacgtttatatgaagtaaagtatctacgatttttacaaaagtccggatgcataagtacaaagtacgcgataaacggaataataatagatttatctagtttatctttttctatagctttcatagttagatacatggtctcagaagtaggattatgtaacatcagcttcgataaaatgactgggttatttagtcttacacattcgctcatacatgtatgaccgttaactacagagtctacactaaaatgattgaacaatagatagtctaccattgtttcgtattcagatagtacagcgtagtacatagcatcttcacaaattatatcattgtctaatagatatttgacgcatcttatggatcccacttcaacagccatcttaaaatcggtagaatcatattgctttcctttatcattaataatttctagaacatcatctctatcataaaagatacaaatattaactgtttgatccgtaataacattgctagtcgatagcaatttgttaataagatgcgctgggctcaatgtcttaataagaagtgtaagaggactatctccgaatttgttttgtttattaacatccgttgatggaagtaaaagatctataatgtctacattcttgactgttttagagcatacaatatggagaggtgtatttccatcatgatctggttttgagggactaattcctagtttcatcatccatgagattgtagaagcttttggattgtctgacataagatgtctatgaatatgatttttgccaaatttatccactatcctggcttcgaatccgatggacattatttttttaaacactctttctgaaggatctgtacacgccaacaacggaccacatccttcttcatcaaccgagttgttaatcttggctccatactgtaccaataaatttattctctctatgacttcatcatctgttcccgagagataatatagaggtgttttattatgtttatcacacgcgtttggatctgcgccgtgcgtcagcagcatcgcgactattctattattattaattttagaagctatatgcaatggataatttccatcatcatccgtctcatttggagagtatcctctatgaagaagttcttcgacaaatcgttcatctagtcctttaattccacaatacgcatgtagaatgtgataattatttccagaaggttcgatagcttgtagcatattcctaaatacatctaaatttttactattatatttggcataaagagatagataatactcggccgacataatgttgtccattgtagtataaaaattaatatttctatttctatttctgtatatttgcaacaatttactctctataacaaatatcataacttagttcttttatgtcaagaaggcactggtttagttcatctataaatgtcacgccataactaccacgcatgccatactcagaattatgataaagatatttatccttggggtgtaggtaatggggattaatctttgttggatcagtctctaagttaacacatgtcacacatgatccatttatagttatatcacacgatgatgatttatgaattgattccggaagatcgctatcgtattttgtggttccacaattcatttccatacatgttattgtcacactaatattatgatgaactttatctagccgctgagtggtaaacaacagaacagatagtttattatctttaccaacaccctcagccgctgccacaaatctctgatccgtatccatgatggtcatgtttatttctagtccgtatccagtcaacactatgttagcatttctgtcgatatagctttcactcatatgacactcaccaataatagtagaattaatgtcgtaatttacaccaatagtgagttcggcggcaaagtaccaataccggtaatcttgtcgaggaggacatatagtattcttgtattctaccgaatacccgagagatgcgatacaaaagagcaagactaatttgtaaaccatcttactcaaaatatgtaacaatagtacgatgcaatgagtaagacaataggaaatctatcttatatacacataattattctatcaattttaccaattagttagtgtaatgttaacaaaaatgtgggagaatctaattagtttttctttacacaattgacgtacatgagtctgagttccttgtttttgctaattatttcatccaatttattattcttgacgatatcgagatcttttgtataggagtcagacttgtattcaacatgcttttctataatcatcttagttatttcggcatcatccaatagtacattttccagattaacagagtagatattaatgtcgtatttgaacagagcctgtaacatctcaatgtctttattatctatagccaatttaatgtccggaatgaagagaagggaattattggtgtttgtcgacgtcatatagtcgagcaagagaatcatcatatccacgtgtccattttttatagtggtgtgaatacaactaaggagaatagccagatcaaaagtagatggtatttctgaaagaaagtatgatacaatacttacatcattaagcatgacggcatgataaaatgaagttttccatccagttttcccatagaacatcagtctccaatttttcttaacaaacagtttcaccgtttgcatgttaccactatcaaccgcataatacaatgcggtgtttcctttgtcatcaaattgtgaatcatccattccactgaatagcaaaatctttactattttggtatcttctaatgtggctgcctgatgtaatggaaattcattctctagaagatttttcaatgctccagcgttcaacaacgtacatactagacgcacgttattatcagctattgcataatacaaggcactatgtccatggacatccgccttaaatgtatctttactagagagaaagcttttcagctgcttagacttccaagtattaattcgtgacagatccatgtctgaaacgagacgctaattagtgtatattttttcattttttataattttgtcatattgcaccagaattaataatatctctaatagatctgattagtagatacatggctatcgcaaaacaacatatacacatttaataaaaataatatttattaagaaaattcagatttcacgtacccatcaatataaataaaataatgattccttccaccgtatccataaacaatattaaggagattctaccttacccataaacaatataaatccagtaatatcatgtctaatgatgaacacaaatggtgtattaaattccagtttttcaggagatgatctcgccgtagctaccatgatagtagatgcctctgctacagttccttgttcgtcgacatctatctttgcattctgaaacattttataaatatataatgggtccctagtcatatgtttaaacgacgcattatctggattaaacatactaggagccatcatttcggctatcgacttaatatccctcttattttcgatagaaaatttagggagtttaagattgtacactttattccctaattgaaacgaccaatagtctaattttgcagccgtaatagaatctgtgaaatgggtcatattatcacctattgccaggtacatactaatattagcatccttatacggaaggcgcaccatatcatattcttcgtcatcgattgtgattgtatttccttgcaatttagtaactacgttcatcatgggaaccgttttcgtaccgtacttattagtaaaactagcattgcgtgttttagtgatatcaaacggatattgccatgtacctttaaaatatatagtattaatgattgcccatagagtattattgtcgagcatattagaatctactacattagacataccggatctacgttctactatagaattaattttattaaccgcatctcgtctaaagtttaatctatataggccgaatctatgatattgttgataatacaacggtttaatgcacacagtattatctacgaaactttgataagttagatcagtgtacgtatatttagatgttttcagcttagctaatcctgatattaattctgtaaatgctggacccagatctctttttctcaaatccatagtcttcaataattctattctagtattacctgatgcaggcaatagcgacataaacatagaaaacgaataaccaaacggtgagaagacaatattatcatcttgaatatttttatacgctactataccggcattggtaaatccttgcagacgataggtagacactgaacacgttaacgatagtatcaataacgcaatcatgattttatggtattaataattaaccttatttttatgttcggtataaaaattattgatgtctacacatccttttgtaattgacatctatatatccttttgtataatcaactctaatcactttaacttttacagttttccctaccagtttatccctatattcaacatatctatccatatgcatcttaacactctctgccaagatagcttcagagtgaggatagtcaaaaagataaatgtatagagcataatccttctcgtatactctgccctttattacatcgcccgcattgggcaacgaataacaaaatgcaagcatcttgttaacgggctcgtaaattgggataaaaattatgtttttatatctattttattcaagagaatattcaggaatttctttttccggttgtatctcatcgcagtatatatcatttgtacattgtttcatattttttaatagtttacaccttttagtaggactagtatcgtacaattcatagctgtattttgaattccaatcacgcataaaaatatcttccaattgttgacgaagacctaatccatcatccggtgtaatattaatagatgctccacatgtatccgtaaagtaatttcctgtccaatttgaggtacctatataggccgttttatcggttaccatatatttggcatggtttaccctagaatacggaatgggaggatcagcatctggtacaataaatagctttacttctatatctatgtttttagattttagcatagcgatagatcttaaaaagtttctcatgataaacgaagatcgttgccagcaactaatcaatagcttaacggatacttgtctgtctatagcggatcttcttaattcatcttctatataaggccaaaacaaaattttacccgccttcgaataaataatagggataaagttcataacagatacataaacgaatttactcgcatttctaatacatgacaataaagcggttaaatcattggttctttccatagtacatagttgttgcggtgcagaagcaataaatacagagtgtggaacaccacttacgttaatactaagaggatgatctgtattataatacgacggataaaagtttttccaattatatggtagattgttaactccaagataccagtatacctcaaaaatttgagtgagatccgctgccaagttcctattattgaagatcgcaatacccaattctttgacctgagttagtgatctccaatccatgttagcgcttcctaaataaatatgtgtattatcagatatccaaaattttgtatgaagaactcctcctaggatatttgtaatatctatgtatcgtacttcaactccggccatttgtagtctttcaacatcctttaatggtttgttagatttattgacggctactctaactcgtactcctcttttgggtaattgtacaatctcgtttaatattatcgtgccgaaattcgtacccacttcatccgataaactccaataaaaagatgatatatctagtgtttttgtggtattggatagaatttccctccacatgttaaatgtagacaaatatactttatcaaattgcatacctataggaatagtctctgtaatcactgcgattgtattatccggattcattttatttgttaaaagaataatcctatatcacttcactctattaaaaatccaagtttctatttctttcatgactgattttttaacttcatccgtttccttatgaagatgatgtttggcaccttcataaatttttatttctctattacaatttgcatgttgcatgaaataatatgcacctgaaacatcactaatctcattgtttgttccctggagtatgagagtcggggggtgttaatcttggaaattatttttctaaccttgttggtagccttcaagacctgactagcaaatccagccttaattttttcatgattgattaatgggtcgtattggtatttataaactttatccatatctctagatactgattctggacatagctttccgactggcgcatttggtgtgatggttcccataagtttggcagctagcagattcagtcttgaaacagcatctgcattaactagaggagacattagaatcattgctgtaaacaagtttggattatcgtaagaggctagtatagaaattgttgctcccatggaatgacccaataagtagatttaatagttaccacgtgctgtaccaaagtcatcaatcatcattttttcaccattacttcttccatgtccaatatgatcatgtgagaatactaaaattcctaacgatgatatgttttcagctagttcgtcataacgtccagaatgtttaccagctccatgacttatgaatactaatgccttaggatatgtaataggtttccaatatatgtaatcattgtccagattgaacatacagtttgcactcatgattcacgttatataactatcaatattaacagttcgtttgatgatcatattatttttatgttttattgataattgtaaaaacatacaattaaatcaatatagaggaaggagacggatactgtcttttgtgagatagtcatggcgactaaattagattatgaggatgctgttttttactttgtggatgatgataaaatatgtagtcgcgactccatcatcgatctaatagatgaatatattacgtggagaaatcatgttatagtgtttaacaaagatattaccagttgtggaagactgtacaaggaattgatgaagttcgatgatgtcgctatacggtactatggtattgataaaattaatgagattgtcgaagctatgagcgaaggagaccactacatcaattttacaaaagtccatgatcaggaaagtttattcgctaccataggaatatgtgctaaaatcactgaacattggggatacaaaaagatttcagaatctagattccaatcattgggaaacattacagatctgatgaccgacgataatataaacatcttgatactttttctagaaaaaaaattgaattgatgatataggggtcttcataacgcataattattacgttagcattctatatccgtgttaaaaaaaattatcctatcatgtatttgagagttttatatgtagcaaacatgatagctgtgatgccaataagctttagatattcacgcgtgctagtgttagggatggtattatctggtggtgaaatgtccgttatataatctacaaaacaatcatcgcatatagtatgcgatagtagagtaaacatttttatagtttttactggattcatacatcgtctacccaattcggttataaatgaaattgtcgccaatcttacacccaaccccttgttatccattagtatagtattaacttcgttatttatgtcataaactgtaaatgattttgtagatgccatatcatacatgatattcatgtccctattataatcattactaactttatcacaatatatgttgataatatctatatatgatctagtctttgtgggcaactgtctatacaagtcgtctaaacgttgtttactcatatagtatcgaacagccatcattacatggtcccgttccgttgatagataatcgagtatgttagtggacttgtcaaatctatataccatattttctggaagtggatatacatagtcgtgatcaacattattgctagcctcatcttctatatcctgtactataccattatctatatcatctacataatctacgatattattacacataaacatcgacaacatactattgtttattatctaagtcctgttgatccaaacccttgatctcctctatttgtactatctagagattgtacttcttccagttctggataatatatacgttgatagattagctgagctattctatctccagtatttacattaaacgtacattttccattattaataagaatgactcctatgtttcccctataatcttcgtctattacaccacctcctatatcaatgccttttagtgacagaccagacctaggagctattctaccatagcaaatcttaggcatggacatactaatatctgtcttaattaactgtctttctcctggagggatagtataatcgtaagcgctatacaaatcatatccggcagcacccggcgattgcctagtaggagatttagctctgttagtttccttaacaaatctaactggtgagttaatattcatgttgaacataaaactaatattttatttcaaaattatttaccatcccatatattccatgaataagtgtgatgattgtacacttctatagtatctatatacgatccacgataaaatcctcctatcaatagcagtttattatccactatgatcaattctggattatccctcggataaataggatcatctatcagagtccatgtattgctggattcacaataaaattccgcatttctaccaaccaagaataaccttctaccgaacactaacgcgcatgatttataatgaggataataagtggatggtccaaactgccactgatcatgattgggtagcaaatattctgtagttgtatcagtttcagaatgtcctcccattacgtatataacattgtttatggatgccactgctggattacatctaggtttcagaagactcggcatattaacccaagcagcatccccgtggaaccaacgctcaacagatgtgggatttggtagacctcctactacgtataatttattgttagcgggtatccccgtagcatacagtctggggctattcatcggaggaattggaatccaattgtttgatatataatttacagctatagcattgttatgtatttcattgttcatccatccaccgatgagatatactacttctccaacatgagtacttgtacacatatggaatatatctataatttgatccatgttcataggatactctatgaatggatacttgtatgatttgcgtggttgtttatcacaatgaaatattttggtacagtctagtatccattttacattatttatacctctgggagaaagataatttgacctgattacatttttgataaggagtagcagatttcctaatttatttcttcgctttatataccacttaatgacaaaatcaactacataatcctcatctggaacatttagttcatcgctttctagaataagtttcatagatagataatcaaaattgtctatgatgtcatcttccagttccaaaaagtgtttggcaataaagtttttagtatgacataagagattggatagtccgtattctatacccatcatgtaacactcgacacaatattcctttctaaaatctcgtaagataaagtttatacaagtgtagatgataaattctacagaggttaatatagaagcacgtaataaattgacgacgttatgactatctatatatacctttccagtatacgagtaaataactatagaagttaaactgtgaatgtcaaggtctagacaaacccttgtaactggatctttatttttcgtgtatttttgacgtaaatgtgtgcgaaagtaaggagataactttttcaatatcgtagaattgactattatattgccacctatagcatcaataattgttttgaatttcttagtcatagacaatgctaatatattcttacagtacacagtattgacaaatatcggcatttatgtttctttaaaagtcaacatctaaagaaaaatgattatcttcttgagacataactcccattttttggtattcacccacacgtttttcgaaaaaattagtttttccttccaatgatatattttccatgaaatcaaacggattggtaacattataaatttttttaaatcccaattcagaaatcaatctatccgcgacaaattctatatatgttttcatcatttcacaattcattcctataagtttaactggaagagccgcagtaagaaattcttgttcaatggatactgcatctgttataatagatctaacggtttcttcactcggtggatacaataaatgtttaaacatcaaacatgcgaagtcgcagtgcagaccctcgtctctactaattagttcgttggaaaacgtgagtccgggcattaggccacgctttttaagccaaaatatggaagcgaatgatccggaaaagaagattccttctactgcagcaaaggcaataagtctctctccataaccggcgctgtcatgtatccacttttgagcccaatcggccttcttttttacacaaggcattgtttctatggcattaaagagatagtttttttcattactatctttaacataagtatcgatcaaaagactatacatttccgaatgaatgttttcaatggccatctgaaatccgtagaaacatctagcctcggtaatctgtacttctgtacaaaatcgttccgccaaattttcattcactattccgtcactggctgcaaaaaacgccaatacatgttttataaaatatttttcgtctggtgttagtttattccaatcattgatatctttagatatatctacttcttccactgtccaaaatgatgcctctgcctttttatacatgttccagatgtcataatattggattgggaaaataacaaatctatttggatttggtgcaaggatgggttccataactaaattaacaatatcaataaattttttttcagttatctatatgcctgtacttggattttttgtacatcgatatcgccgcaatcactacaataattacaagtattattgatagcattgttattagtactatcataattaaattatcgacattcatgggtgctgaataatcgttattatcatcattatcattttgtaattgtgacatcatactagataaatcgtttgcgagattgttgtgggaagcgggcatggaggatgcattatcattattatttaacgccttccattcggattcacaaatatggcgcgcgttcaacattttatggaaactataattttgtgaaaacagataacaagaaaactcgtcatcgttcaaatttttaacgatagtaaaccgattaaacgtcgagctaatttctaacgctagcgactctgttggatatgggtttccagatatatatcttttcagttcccctacgtatctataatcatctgtaggaaatggaagatatttccatttatctactgttcctaatatcatatgtggtggtgtagtagaaccattaagcgcgaaagatgttatttcgcatcgtattttaacttcgcaataatttctggttagataacgcactctaccagtcaagtcaatgatattagcctttacagatatattcatagtagtcgtaacgatgactccatcttttagatgcgatactcctttgtatgtaccagaatcttcgtacctcaaactcgatatatttaaacaagttaatgagatattaacgcgttttatgaatgatgatatataaccagaagttttatcctcggtggctagcgctataaccttatcattataataccaactagtgtgattaatatgtgacacgtcagtgtgggtacaaatatgtacattatcgtctacgtcgtattcgatacatccgcatacagccaacaaatataaaatgacaaatactctaacgacgttcgtacccatcttgatgcggtttaataaatgttttgatttcaatttattgtaaaaaaagattcggttttatactgttcgatattctcattgcttatattttcatctatcatctccacacagtcaaatccgtggttagcatgcacctcatcaaccggtaaaagactatcggactcttctatcattataactctagaatatttaatttggtcattattaatcaagtcaattatcttatttttaacaaacgtgagtattttactcattttttataaaaacttttagaaatatacagactctatcgtgtgtctatatcttctttttatatccaatgtatttatgtctgatttttcttcatttatcatatataatggtccaaattctacacgtgcttcggattcatccagatcattaaggttcttataattgtaacatccttctcttccctcttctacatcttccttcttattcttattcttattcttattcttattcttattcttattcttattcttagcgtcacagaatctaccacagcagaatcccatgacgagcgtcatattaaactaattcattttcaattataatatacgattagtaatgaccattaaaataaaaaatattcttcataaccggcaagaaagtgaaaagttcacattgaaactatgtcagtagtatacatcatgaaatgatgatatatatattctctattttggtggaggattatatgatataattcgtggataatcattcttaagacacatttcttcattcgtaaatcttttcacgttaaatgagtgtccatattttgcaatttcttcatatgatggcggtgtacgtggacgaggctgctcctgttcttgttgtggtcgccgactatcgtgtttgcgtttagatccctccattatcgcgattgcgtagatggagtactattttataccttgtaattaaatttttttattaattaaacgtataaaaacgttccgtatctgtatttaagagccagatttcgtctaatagaacaaatagctacagtaaaaataactagaataattgctacacccactagaaaccacggatcgtaatacggcaatcggttttcgataataggtggaacgtatattttatttaaggacttaacaattgtctgtaaaccacaatttgcttcagcggatcctgtattaactatctgtaaaagcatatgttgaccgggcggagccgaacattctccgatatctaatttctgtatatctataatattattaacctccgcatacgcattacagttcttttctagcttggataccgcactaggtacatcgtctagatctattcctatttcctcagcgatagctcttctatccttttccggaagcaatgaaatcacttcaataaatgattcaaccatgagtgtgaaactaagtctagaattactcatgcatttgttagttattcggagcgcgcaatttttaaactgtcctataacctctcctatatgaatagcacaagtgacattagtagggatagaatgttgagctaatttttgtaaataactatctataaaaagattatacaaagttttaaactctttagtttccgccatttatccagtctgagaaaatgtctctcataataaatttttccaagaaactaattgggtgaagaatggaaacctttaatctatatttatcacagtctgttttggtacacatgatgaattcttccaatgccgtactaaattcgatatctttttcgatttctggatatgtttttaataaagtatgaacaaagaaatggaaatcgtaataccagttatgtttaactttgaaattgttttttattttcttgttaatgattccagccacttgggaaaagtcaaagtcgtttaatgccgatttaatacgttcattaaaaacaaactttttatcctttagatgaattattattggttcattggaatcaaaaagtaagatattatcgggtttaagatctgcgtgtaaaaagttgtcgcagcatggtagttcgtagattttaatgtataacagagccatctgtaaaaagataaactttatgtattgtaccaaagatttaaatcctaatttgatagctaactcggtatctactttatctgccgaatacagtgctaggggaaaaattataatgtttcctctttcatattcgtagttagttctcttttcatgttcgaaaaagtgaaacatgcggttaaaatagtttataacattaatattactgttaataactgccgggtaaaagtgggatagtaatttcacgaatttgatactgtcctttctctcgttaaacgcctttagaaaaactttagaagaatatctcaatgagagttcctgaccatccatagtttgtatcaataatagcaacatatgaagaacacgtttatacagagtatgtaaaaatgttaatttatagtttaatcccatggcccacgcacacacgattaattttttttcatctccctttagattgttgtatagaaatttgggtactgtgaactccgccgtagtttccatgggactatataattttgtggcctcgaatacaaattttactacatagttatctatcttaaaaactataccatatcctcctgtagatatgtgataaaaatcgtcgtttataggataaaatcgtttatccttttgttggaaaaatgatgaattaatgtaatcattctcttctatctttagtagtgtttccctattaaaattcttaaaataatttaacaatctaactgacggagcccaattttggtgtaaatctaattgggacattatgttgttaaaatataaacagtctcctaatataacagtatctgataatctatggggagacatccattgatattcaggggatgaatcattggcaacacccatttattgtacaaaaagccccaatttacaaacgaaagtccaggtttgatagagacaaactattaactattttgtctctgtttttaacacctccacagtttttaatttctttggtaatgaaattattcacaatatcagtatcttctttatctaccagagattttactaacttgataaccttggctgtctcattcaatagggtagtaatatttgtatgtgtgatattgatatctttttgaattgtttcttttagaagtgattctttgatggtgtcagcatacgaattacaataatgcagaaactcggttaacatgcaggaattatagtaagccaattccaattgttgcctgtgttgtattagagtgtcaatatgagcaatggtgtccttgcgtttctctgatagaatgcgagcagcgattttggcgttatcatttgacgatatttctggaatgacgaatcctgtttctactaactttttggtaggacaaagtgaaacaatcaagaagatagcttctcctcctatttgtggaagaaattgaactcctctagatgatctactgacgatagtatctccttgacagatattggaccgaattacagaagtacctggaatgtaaagccctgaaaccccctcattttttaagcagattgttgccgtaaatcctgcactgtgaccaagatagagagctcctttggtgaatccatctctatgtttcagtttaaccaagaaacagtcagctggtctaaaatttccatctctatctaatacagcatctaacttgatgtcaggaactatgaccggtttaatgttatatgtaacattgagtaaatccttaagttcataatcatcactgtcatcagttatgtacgatccaaacaatgtttctaccggcatagtggatacgaagatgctatccatcagaatgtttccctgattagtattttctatatagctattcttctttaaacgattttccaaatcagtaactatgttcatttttttaggagtaggacgcctagccagtatggaagaggattttctagatcctctcttcaacatctttgatctcaatggaatgcaaaaccccatagtgaaacaaccaacgataaaaataatattgtttttcactttttataattttaccatctgactcatggattcattaatatctttataagagctactaacgtataattctttataactgaactgagatatatacaccggatctatggtttccataattgagtaaatgaatgctcggcaataactaatggcaaatgtatagaacaacgaaattatactagagttgttaaagttaatattttctatgagctgttccaataaattatttgttgtgactgcgttcaagtcataaatcatcttgatactatccagtaaaccgtttttaagttctggaatattattatcccattgtaaagcccctaattcgactatcgaatatcctgctctgatagcagtttcaatatcgacggacgtcaatactgtaataaaggtggtagtattgtcatcatcgtgataaactactggaatatggtcgttagtaggtacggtaactttacacaacgcgatatataactttccttttgtaccatttttaacgtagttgggacgtcctgcagggtattgttttgaagaaatgatatcgagaacagatttgatacgatatttgttggattcctgattatttactataatataatctagacagatagatgattcgataaatagagaaggtatatcgttggtaggataatacatccccattccagtattctcggatactctattaatgacactagttaagaacatgtcttctattctagaaaacgaaaacatcctacatggactcattaaaacttctaacgctcctgattgtgtctcgaatgcctcgtacaaggatttcaaggatgccatagattctttgaccaacgatttagaattgcgtttagcatctgatttttttattaaatcgaatggtcggctctctggtttgctaccccaatgataacaatagtcttgtaaagataaaccgcaagaaaatttatacgcatccatccaaataaccctagcaccatcggatgatattaatgtattattatagattttccatccacaattattgggccagtatactgttagcaacggtatatcgaatagattactcatgtaacctactagaatgatagttcgtgtactagtcataatatctttaatccaatctaagaaatttaaaattagattttttacactgttaaagttaacaaaggtattacccgggtacgtggatatcatatatggtattggtccattatcagtaatagctccataaactgatacggcgatggtttttatatgtgtttgatctaacgaggaagaaattcgcacccacaattcatctctagatatgtatttaatatcaaacggtaacacatcaatttcgggacgcgtatatgtttctaaatttttaatccaaatataatgatgacctatatgccctattatcatactgtcaactatagtacacctagagaacttacgatacatctgtttcctataatcgttaaattttacaaatctataacatgctaaaccttttgacgacaaccattcattaatttctgatatggaatctgtattctcgataccgtattgttctaaagccagtgctatatctccctgttcgtgggaacgctttcgtataatatcgatcaacggataatctgaagtttttggagaataatatgactcatgatctatttcgtccataaacaatctagacataggaattggaggcgatgatcttaattttgtgcaatgagtcgtcaatcctataacttctaatcttgtaatattcatcatcgacataatactatctatgttatcatcgtatattagtataccatgaccttcttcatttcgtgccaaaatgatatacagtcttaaatagttacgcaatatctcaatagtttcataattgttagctgttttcatcaagatttgtaccctgtttaacatgatggcgttctatacgtttctattttctattttttaaatttttaaatttttaacgatttactgtggctagatacccaatctctctcaaatatttttttagcctcgcttacaagctgtttatctatactattaaaactgacgaatccgtgattttggtaatgggttccgtcgaaatttgccgaagtgatatgaacatattcgtcgtcgactatcaacaattttgtattattctgaatagtgaaaaccttcacagatagatcattttgaacacacaacgcgtctagacttctggcggttgccatagaatatacgtcgttcttatcccaattaccaactagaagtctgatcttaactcctctattaatggctgcttctataatggagttgtaaatatcgggccaatagtagctattaccgtcgacacgtgtagtgggaactatggccaaatgttcaatatctatactagtcttagctgacctgagtttatcaataactacatcggtatctagatctctagaatatcccaataggtgttccggagaatcagtaaagaacactccacctataggattcttaatatgatacgcagtgctaactggcagacaacaagccgcagagcataaattcaaccatgaattttttgcgctattaaaggctttaaaagtatcaaatcttctacgaagatctgtggccagcgggggataatcagaatatacacctaacgttttaatcgtatgtatagatcctccagtaaatgacgcgtttcctacataacatctttcatcatctgacacccaaaaacaaccgagtagtagtcccacattattttttttatctatattaacggttataaaatttatatccgggcagtgactttgtagctctcccagatttcttttccctcgttcatctagcaaaactattattttaatccctttttcagatgcctcttttagtttatcaaaaataagcgctcccctagtcgtactcagaggattacaacaaaaagatgctatgtatatatatttcttagctagagtgataatttcgttaaaacattcaaatgttgttaaatgatcggatctaaaatccatattttctggtagtgtttctaccagcctacattttgctcccgcaggtaccgatgcaaatggccacatttagttaacataaaaacttatacatcctgttctatcaacgattctagaatatcatcggctatatcgctaaaattttcatcaaagtcgacatcacaacctaactcagtcaatatattaagaagttccatgatgtcatcttcgtctatttctatatccgtatccattgtagattgttgaccgattatcgagtttaaatcattactaatactcaatccttcagaatacaatctgtatttcattgtaaatttataggcggtgtatttaagttggtagattttcaattatgtatcaatatagcaacagtagttcttgctcctccttgattctagcatcctcttcattattttcttctacgtacataaacatgtccaatacgttagacaacacaccgacgatggcggccgccacagacacgaatatgactagaccgatgaccatttaaaaacccctctctagctttcacttaaactgtatcgatcattcttttagcacatgtataatataaaaaaacattattctatttcgaatttaggcttccaaaaatttttcatccgtaaaccgataataatatatatagacttgttaatagtcggaataaatagattaatgcttaaactatcatcatctccacgattagagatacaatatttacattctttttgctgtttcgaaactttatcaatacacgttaatacaaacccaggaaggagatattgaaactgaggctgttgaaaatgaaacggtgaatacaataattcagataatgtaaaatcatgattccgtattctgatgatattagaactgctaatggatgtcgatggtatgtatctaggagtatctattttaacaaagcatcgatttgctaatatacaattatcattttgattaattgttattttattcatattcttaaaaggtttcatatttatcaattcttctacattaaaaatttccatttttaatttatgtagccccgcaatactcctcattacgtttcattttttgtctataatatccattttgttcatctcggtacatagattatccaattgagaagcgcatttagtagttttgtacattttaagtttattgacgaatcgtcgaaaactagttatagttaacattttattatttgataccctgatattaatacccctgccgttactattatttataactgatgtaacccacgtaacattggaattaactatcgatagtaatgcatcgacgcttccaaaattgtctattataaactcaccgataatttttttattacatgttttcatattcattaggattatcaaatctttaatcttactacgattgtatgcgttgatattacaagacgtcattctaaaagacggaggatttccatcaaatgccagacaatcacgtacaaagtacatggaaataggttttgttctattgcgcatcatagattcatatagaacacccgtagaaatactaatttgttttactctataaaatactaatgcatctatttcatcgttttgtataacgtctttccaagtgtcaaattccaaatttttttcattgatagtaccaaattcttctatctctttaactacttgcatagataggtaattacagtgatgcctacatgccgttttttgaaactgaatagatgcgtctagaagcgatcgtacgctagtcacaatcaccactttcatatttagaatatatgtatgtaaaaatatagtagaatttcattttgtttttttctatgctataaatgaattctcattttgcatctgctcatactccgttttatatcaataccaaagaaggaagatatctggttctaaaagccgttaaagtatgcgatgttagaactgtagaatgcgaaggaagtaaagcttcctgcgtactcaaagtagataaaccctcatcacccgcgtgtgagagaagaccttcgtccccgtccagatgcgagagaatgaataaccctggaaaacaagtcccgtttatgaggacggacatgctacaaaatatgttcgcggctaatcgcgataatgtagcttctagacttttgaactaaaatacaattatatctttttcgatattaataaatccgtgtcgtccaggttttttatctctttcagtatgtgaatagataggtattttatctctattcatcatcgaatttaagagatccgataaacattgtttgtattctccagatgtcagcatctgatacaacaatatatgtgcacataaacctctggcacttatttcatgtaccttccccttatcactaaggagaatagtatttgagaaatatgtatacatgatattatcatgaattagatatacagaatttgtaacactctcgaaatcacacgatgtgtcggcgttaagatctaatatatcactcgataacacattttcatctagatacactagacattttttaaagctaaaatagtctttagtagtgacagtaactatgcgattattttcatcgatgatacatttcatcggcatattattacgcttaccatcaaagactataccatgtgtatatctaacgtattctagcatagttgccatacgtgcattaaacttttcaggatctttggatagatcttccaatctatctatttgagaaaacatttttatcatgttcaatagttgaaacgtcggatccactatatagatattatctataaagattttaggaactacgttcatggtatcctggcgaatattaaaactatcaatgatatgattatcgttttcatcttttatcaccatatagtttctaagatatgggattttacttaatataatattatttcccgtaataaattttattagaaatgccaaatctataagaaaagtcctcgaattagtttgaagaatatctatatcgccgtaccgtatatttggattaattagatatagagaatatgatccgtaacatatacaacttttattatggcgtctaagatattcttccatcaacttattaacatttttgactagggaagatacattatgacgtcccattacttttgccttgtctattattgcgacgttcatagaatttagcatatctcttgccaattcttccattgatgttacattataagaaattttagatgaaattacatttggagctttaatagtaagaactcctaatatgtccgtgtatgtggtcactaatacagattgtagttctataatcgtaaataatttacctatattatatgtttgagtctgtttagaaaagtagctaagtatacgatcttttatttctgatgcagatgtatcaacatcggaaaaaaatctttttttattcttttttactaaagatacaaatatgtctttgttaaaaacagttattttttgaatatttctagcttgtaattttaacatatgatattcattcacactaggtactctgcctaaataggtttctataatctttaatgtaatattaggaaaagtattctgatcaggattcctattcattttgaggatttaaaactctgattattgtctaatatggtctctacgcaaactttttcacagagcgatagagtttttgataactcgtttttcttaagaaatataaaactactgtctccagagctcgctctatcttttattttatttaattcgatacaaactcctgatactggttcagaaagtaattcattaattttcagtcctttatagaagatatttaatatagataatacaaaatcttcagtttttgatatcgatctgattgatcctagaactagatatattaataacgtgctcattaggcagtttatggcagcttgataattagatatagtatattccagttcatatttattagataccgcattgcccagattttgatattctatgaattcctctgaaaataaatccaaaataactaaacattctattttttgtggattagtgtactctcttccctctatcatgttcactactggtgtccacgatgataaatatctagagggaatataatatagtccataggatgccaatctagcaatgtcgaataactgtaatttgattcttcgttcttcattatgaattgattcttgaggtataaacctaacacaaattatattattagacttttcgtatgtaatgtctttcatgttataagtttttaatcctggaatagaatctattttaatgaggcttttaaacgcagagttctccaacgagtcaaagcataatactctgttgtttttcttatatacgatgttacgattttcttctttgaatggaataggtttttgaattagtttataattacaacataatagataaggaagtgtgcaaatagtacgcggaaaaaacataatagctcccctgttttcatccatggttttaagtaaatgatcactggcttctttagttaatggatattcgaacattaaccgtttcatcatcattggacagaatccatatttcttaatgtaaagagtgatcaaatcattgtgtttattgtaccatcttgttgtaaatgtgtattcggttatcggatctgctcctttttctattaaagtatcgatgtcgatctcgtctaagaattcaactatatcgacatatttcatttgtatacacataaccattactaacgtagaatgtataggaagagatgtaacgggaacagggtttgttgattcgcaaactattctaatacataattcttctgttaatacgtcttgcacgtaatctattatagatgccaagatatctatataattattttgtaagatgatgttaactatgtgatctatataagtagtgtaataattcatgtatttcgatatatgttccaactctgtctttgtgatgtctagtttcgtaatatctatagcatcctcaaaaaatatattcgcatatattcccaagtcttcagttctatcttctaaaaaatcttcaacgtatggaatataataatctattttacctcttctgatatcattaatgatatagtttttgacactatcttctgtcaattgattcttattcactatatctaagaaacggatagcgtccctaggacgaactactgccattaatatctctattatagcttctggacataattcatctattataccagaattaatgggaactattccgtatctatctaacatagttttaagaaagtcagaatctaagacctgatgttcatatattggttcatacatgaaatgatctctattgatgatagtgactatttcattctctgaaaattggtaactcattctatatatgctttccttgttgatgaaggatagaatatactcaatagaatttgtaccaacaaactgttctcttatgaatcgtatatcatcatctgaaataatcatgtaaggcatacatttaacaattagagacttgtctcctgttatcaatatactattcttgtgataatttatgtgtgaggcaaatttgtccacgttctttaattttgttatagtagatatcaaatccaatggagctacagttcttggcttaaacagatatagtttttctggaacaaattctacaacattattataaaggactttgggtagataagtgggatgaaatcctattttaattaatgctatcgcattgtcctcgtgcaaatatccaaacgcttttgtgatagtatggcattcattgtctagaaacgctctacgaatatctgtgacagatatcatctttagagaatatactagtcgcgttaatagtactacaatttgtattttttaatctatctcaataaaaaaattaatatgtatgattcaatgtataactaaactactaactgttattgataactagaatcagaatctaatgatgacgtaaccaagaagtttatctactgccaatttagctgcattatttttagcatctcgtttagattttccatctgccttatcgaatactcttccgtcgatgtctacacaggcataaaatgtaggagagttactaggcccaactgattcaatacgaaaagaccaatctctcttagttatttggcagtactcattaataatggtgacagggttagcatctttccaatcaataatttttttagccggaataacatcatcaaaagacttatgatcctctctcattgatttttcgcgggatacatcatctattatgacgtcagccatagcatcagcatccggcttatccgcctccgttgtcataaaccaacgaggaggaatatcgtcggagctgtacaccatagcactacgttgaagatcgtacagagctttattaacttctcgcttctccatattaagttgtctagttagttgtgcagcagtagctccttcgattccaatgtttttaatagccgcacacacaatctctgcgtcagaacgctcgtcaatatagatcttagacatttttagagagaactaacacaaccagcaataaaactgaacctactttatcatttttttattcatcatcctctggtggttcgtcgtttctatcgaatgtagctctgattaacccgtcatctataggtgatgctggttctggagattctggaggagatggattattatctggaagaatctctgttatttccttgttttcatgtatcgattgcgttgtaacattaagattgcgaaatgctctaaatttgggaggcttaaagtgttgtttgcaatctctacacgcgtgtctaactagtggaggttcgtcagctgctctagtttgaatcatcatcggcgtagtattcctacttttacagttaggacacggtgtattgtatttctcgtcgagaacgttaaaataatcgttgtaactcacatcctttattttatctatattgtattctactcctttcttaatgcattttataccgaataagagatagcgaaggaattctttttcggtgccgctagtacccttaatcatatcacatagtgttttatattccaaatttgtggcaatagacggtttatttctatacgatagtttgtttctggaatcctttgagtattctataccaatattattctttgattcgaatttagtttcttcgatattagattttgtattacctatattcttgatgtagtactttgatgatttttccatggcccattctattaagtcttccaagttggcatcatccacatattgtgatagtaattctcggatatcagtagcggctaccgccattgatgtttgttcattggatgagtaactactaatgtatacattttccatttataacacttatgtattaactttgttcatttatattttttcattattatgttgatattaacaaaagtgaatatatatgttaataattgtattgtggttatacggctacaatttcataatgagtggaagtcagtgtccgatgatcaatgacgatagctttactctgaaaagaaagtatcaaatcgatagtgcggagtcaacaatgaaaatggataagaagaggacaaagtttcagaatagagccaaaatggtaaaagaaataaatcagacaataagagcagcacaaactcattacgagacattgaaactaggatacataaaatttaagagaatgattaggactactactctagaagatatagcaccatctattccaaataatcagaaaacttataaactattctcggacatttcagccatcggcaaagcatcacagaatccgagtaagatggtatatgctctgctgctttacatgtttcccaatttgtttggagatgatcatagattcattcgttatagaatgcatccaatgagtaaaatcaaacacaagatcttctctcctttcaaacttaatcttattagaatattagtggaagaaagattctataataatgaatgcagatctaataaatggagaataattggaacacaagttgataaaatgttgatagctgaatctgataaatatacaatagatgcaaggtataacctaaaacccatgtatagaatcaagggaaaatctgaagaagataccctcttcatcaaacagatggtagaacaatgtgtgacatcccaggaattggtggaaaaagtgttgaagatactgtttagagatttgttcaagagtggagaatacaaagcgtacagatacgatgatgatgtagaaaatggatttattggattggatacactaaaattaaacattgttcatgatatagttgaaccatgtatgcctgttcgtaggccagtggctaagatactgtgtaaagaaatggtaaataaatactttgagaatccgctacatattattggtaaaaatcttcaagagtgcattgactttgttagtgaataggcatttcatctttctccaatactaattcaaattgttaaattaataatggatagtataaatagttattagtgataaaatagtaaaaataattattagaataagagtgtagtatcatagataactctcttctataaaaatggattttattcgtagaaagtatcttatatacacagtagaaaataatatagattttttaaaggatgatacattaagtaaagtaaacaattttaccctcaatcatgtactagctctcaagtatctagttagcaattttcctcaacacgttattactaaggatgtattagctaataccaatttttttgttttcatacatatggtacgatgttgtaaagtgtacgaagcggttttacgacacgcatttgatgcacccacgttgtacgttaaagcattgactaagaattatttatcgtttagtaacgcaatacaatcgtacaaggaaaccgtgcataaactaacacaagatgaaaaatttttagaggttgccgaatacatggacgaattaggagaacttataggcgtaaattatgacttagttcttaatccattatttcacggaggggaacccatcaaagatatggaaatcatttttttaaaactgtttaagaaaacagacttcaaagttgttaaaaaattaagtgttataagattacttatttgggcttacctaagcaagaaagatacaggcatagagtttgcggataatgatagacaagatatatacactctatttcaacaaactggtagaatcgtccatagcaatctaacagaaacgtttagagattatatctttcccggagataagactagctattgggtgtggttaaacgaaagtatagctaatgatgcggatattgttcttaatagacacgccattaccatgtatgataaaattcttagttatatatactctgagataaaacaaggacgcgttaataaaaacatgcttaagttagtttatatctttgagcctgaaaaagatatcagagaacttctgctagaaatcatatatgatattcctggagatatcctatctattattgatgcaaaaaacgacgattggaaaaaatattttattagtttttataaagctaattttattaacggtaatacatttattagtgatagaacgtttaacgaggacttattcagagttgttgttcaaatagatcccgaatatttcgataatgaacgaattatgtctttattctctacgagtgctgcggacattaaacgatttgatgagttagatattaataacagttatatatctaatataatttatgaggtgaacgatatcacattagatacaatggatgatatgaagaagtgtcaaatctttaacgaggatacgtcgtattatgttaaggaatacaatacatacctgtttttgcacgagtcggatcccatggtcatagagaacggaatactaaagaaactgtcatctataaaatccaagagtaaacggctgaacttgtttagcaaaaacattttaaaatattatttagacggacaattggctcgtctaggtcttgtgttagatgattataaaggagacttgttagttaaaatgataaaccatcttaagtctgtggaggatgtatccgcattcgttcgattttctacagataaaaaccctagtattcttccatcgctaatcaaaactattttagctagttataatatttccatcatcgtcttatttcaaaggtttttgagagataatctatatcatgtagaagaattcttggataaaagcatccatctaaccaagacggataagaaatatatacttcaattgataagacacggtagatcatagaacagaccaaatatattattaataatttggtatatacatagatattaattatcacatattaaaaattcacacatttttgataaatgggaactgctgcaacaattcagactcccaccaaattaatgaataaagaaaatgcagaaatgattttggaaaaaattgttgatcatatagttatgtatattagtgacgaatcaagtgattcagaaaataatcctgaatatattgattttcgtaacagatacgaagactatagatctctcattataaaaagtgatcacgagtttgtaaagctatgtaaaaatcatgcagagaaaagttctccagaaacgcaacaaatgattatcaaacacatatacgaacaatatcttattccagtatctgaagtactattaaaacctataatgtccatgggtgacataattacatataacggatgtaaagacaatgaatggatgctagaacaactctctaccctaaactttaacaatctccgcacatggaactcatgtagcataggcaatgtaacgcgtctgttttatacattttttagttatctgatgaaagataaactaaatatataagtataatcccattctaatactttaacctgatgtattagcatcttattagaatattaacctaactaaaagacataacataaaaactcattacatagttgataaaaagcggtaggatataaatattatggctgccaccgttccgcgttttgacgacgtgtacaaaaatgcacaaagaagaattctagatcaagaaacattttttagtagaggtctaagtagaccgttaatgaaaaacacatatctatttgataattacgcgtatggatggataccagaaactgcaatttggagtagtagatacgcaaacttagatgcaagtgactattatcccatttcgttgggattacttaaaaagttcgagtttctcatgtctctatataaaggtcctattccagtatacgaagaaaaagtaaatactgaattcatagccaatggatcgttctctggtagatacgtatcatatcttcgaaagttttctgctcttccaacaaacgagtttattagttttttattattgacctccatccctatctataatatcttattctggtttaaaaacacacagtttgatattactaaacacacattattcagatacgtctatacagataatgccaaacacctggcgttggctaggtatatgcatcaaacaggagactataagcctttgtttagtcgtctcaaagagaattatatatttaccggtcccgttccaatatgtatcaaagatatagatcaccctaatcttagtagagcaagaagtccatccgattatgagacattagctaatattagtactatattgtactttaccaagtatgatccggtattaatgtttttattgttttacgtacctgggtattcaattactacaaaaattactccagccgtagaatatctaatggataaactgaatctaacaaagagcgacgtacaactgttgtaaattattttatgcttcgtaaaatgtaggttttgaaccaaacattctttcaaagaatgagatgcataaaactttattatccaatagattgactatttcggacgtcaatcgtttaaagtaaacttcgtaaaatattctttgatcactgccgagtttaaaacttctatcgataattgtctcatatgttttaatatttacaagttttttggtccatggtacattagccggacaaatatatgcaaaataatatcgttctccaagttctatagtttctggattatttttattatattcagtaaccaaatacatattagggttatctgcggatttataatttgagtgatgcattcgactcaacataaataattctagaggagacgatctactatcaaattcggatcgtaaatctgtttctaaagaacggagaatatctatacatacctgattagaattcatccgtccttcagacaacatctcagacagtctggtcttgtatgtcttaatcatattcttatgaaacttggaaacatctcttctagtttcactagtacctttattaattctctcaggtacagattttgaattcgacgatgctgagtatttcatcgttgtatatttcttcttcgattgcataatcagattcttatataccgcctcaaactctattttaaaattattaaacaatactctattattaatcagtcgttctaactctttcgctatttctatagacttatcgacatcttgactgtctatctctgtaaacacggagtcggtatctccatacacgctacgaaaacgaaatctgtaatctataggcaacgatgttttcacaatcggattaatatctctatcgtccatataaaatggattacttaatggattggcaaaccgtaacataccgttagataactctgctccatttagtaccgattctagatacaagatcattctacgtcctatggatgtgcaactcttagccgaagcgtatgagtatagagcactatttctaaatcccatcagaccatatactgagttggctactatcttgtacgtatattgcatggaatcatagatggccttttcagttgaactggtagcctgttttaacatctttttatatctggctctctctgccaaaaatgttcttaatagtctaggaatggttccttctatcgatctatcgaaaattgctatttcagagatgaggttcggtagtctaggttcacaatgaaccgtaatatatctaggaggtggatatttctgaagcaatagctgattatttatttcttcttccaatctattggtactaacaacgacaccgactaatgtttccggagatagatttccaaagatacacacattaggatacagactgttataatcaaagattaatacattattactaaacattttttgttttggagcaaataccttaccgccttcataaggaaacttttgttttgtttctgatctaactaagatagttttagtttccaacaatagctttaacagtggacccttgatgactgtactcgctctatattcgaataccatggattgaggaagcacatatgttgacgcacccgcgtctgtttttgtttctactccataatactcccacaaatactgacacaaacaagcatcatgaatacagtatctagccatatctaaagctatgtttagattataatccttatacatctgagctaaatcaacgtcatcctttccgaaagataatttatatgtatcattaggtaaagtaggacataatagtacgactttaaatccattttcccaaatatctttacgaattactttacatataatatcctcatcaacagtcacataattacctgtggttaaaacctttgcaaatgcagcggctttgcctttcgcgtctgtagtatcgtcaccgataaacgtcatttctctaactcctctatttaatactttacccatgcaactgaacgcgttcttggatatagaatccaatttgtacgaatccaatttttcagatttttgaatgaatgaatatagatcgaaaaatatagttccattattgttattaacgtgaaacgtagtattggccatgccgcctactcccttatgactagactgatttctctcataaatacagagatgtacagcttcctttttgtccggagatctaaagataatcttctctcctgttaataactctagacgattagtaatatatctcagatcaaagttatgtccgttaaaggtaacgacgtagtcgaacgttagttccaacaattgtttagctattcgtaacaaaactatttcagaacatagaactagttctcgttcgtaatccatttccattagtgactgtatcctcaaacatcctctatcgacggcttcttgtatttcctgttccgttaacatctcttcattaatgagcgtaaacaataatcgtttaccacttaaatcgatataacagtaacttgtatgcgagattgggttaataaatacagaaggaaacttcttatcgaagtgacactctatatctagaaataagtacgatcttgggatatcgaatctaggtatttttttagcgaaacagttacgtggatcgtcacaatgataacatccattgttaatctttgtcaaatattgctcgtccaacgagtaacatccgtctggagatatcccgttagaaatataaaaccaactaatattgagaaattcatccatggtggcattttgtatgctgcgtttctttggctcttctatcaaccacatatctgcgacggagcattttctatctttaatatctagattataacttattgtctcgtcaatgtctatagttctcatctttcccaacggcctcgcattaaatggaggaggagacaatgactgatatatttcgtccgtcactacgtaataaaagtaatgaggaaatcgtataaatacggtctcaccatttcgacatctggatttcagatataaaaatctgttttcaccgtgactttcaaaccaattaatgcaccgaacatccatttatagaatttagaaatatattttcatttaaatgaatcccaaacattggggaagagccgtatggaccattatttttatagtactttcgcaagcgggtttagacggcaacatagaagcgtgtaaacgaaaactatatactatagttagcactcttccatgtcctgcatgtagacggcacgcgactattgctatagaggacaataatgtcatgtctagcgatgatctgaattatatttattattttttcatcagattatttaacaatttggcatctgatcccaaatacgcaatcgatgtgtcaaaggttaaacctttataaacttaacccattataaaacttatgattagtcacgactgaaataaccgcgtgattattttttggtataattctacacggcatggtttctgtgactatgaattcaacccccgttacattagtgaaatctttaacaaacagcaagggttcgtcaaagacataaaactcattgtttacaatcgaaatagaccccctatcacacttaaaataaaaaatatccttatcctttaccaccaaataaaattctgattggtcaatgtgaatgtattcacttaacagttccacaaatttatttattaactccgaggcacatacatcgtcggtattttttatggcaaactttactcttccagcatccgtttctaaaaaaatattaacgagttccatttatatcatccaatattattgaaatgacgttgatggacagatgatacaaataagaaggtacggtacctttgtccaccatctcctccaattcatgctctattttgtcattaactttaatgtatgaaaacagtacgccacatgcttccatgacagtgtgtaacactttggatacaaaatgtttgacattagtataattgtttaagactgtcaatctataatagatagtagctataatatattctatgatggtattgaagaagatgacaatcttggcatattgatcatttaacacagacatggtatcaacagatagcttgaatgaaagagaatcagtaattggaataagcgtcttctcgatggagtgtccgtataccaacatgtctgatattttgatgtattccattaaattatttagttttttctttttattctcgttaaacagcatttctgtcaacggaccccaacatcgttgaccgattaagttttgattgatttttccgtgtaaggcgtatctagtcagatcgtatagcctatccaataatccatcatctgtgcgtagatcacatcgtacactttttaattctctatagaagagcgacagacatctggaacaattacagacagcaatttctttattctctacagatgtaagatacttgaagacattcctatgatgatgcagaattttggataacacggtattgatggtatctgttaccataattcctttgatggctgatagtgtcagagcacaagatttccaatctttgacaatttttagcaccattatctttgttttgatatctatatcagacagcatggtgcgtctgacaacacagggattaagacggaaagatgaaatgattctctcaacatcttcaatggataccttgctattttttctggcattatctatatgtgcgagaatatcctctagagaatcagtatcctttttgatgatagtggatctcaatgacatgggacgtctaaaccttcttattctatcaccagattgcatggtgatttgtcttctttcttttatcataatgtaatctctaaattcatcggcaaattgtctatatctaaaatcataatatgagatgtttacctctacaaatatctgttcgtccaatgttagagtatctacatcagttttgtattccaaattaaacatggcaacggatttaattttatattcctctattaagtcctcgtcgataataacagaatgtagataatcatttaatccatcgtacatggttggaagatgcttgttgacaaaatctttaattgtcttgatgaaggtgggactatatctaacatcttgattaataaaatttataacattgtccataggatactttgtaactagttttatacacatctcttcatcggtaagtttagacagaatatcgtgaacaggtggtatattatattcatcagatatacgaagaacaatgtccaaatctatattgtttaatatattatatagatgtagtgtagctcctacaggaatatctttaactaagtcaatgatttcatcaaccgttagatctattttaaagttaatcatataggcattgatttttaaaaggtatgtagccttgactacattctcattaattaaccattccaagtcactgtgtgtaagaagattatattctatcataagcttgactacatttggtcccgataccattaaagaattcttatgatataaggaaacagcttttaggtactcatctactctacaagaattttggagagccttaacgatatcagtgacgtttattatttcaggaggaaaaaacctaacattgagaatgtcggagttaatagcttccagatacagtgattttggcaatagtccgtgtaatccataatccagtaacacgagctggtgcttgctagacaccttttcaatgtttaatttttttgaaataagctttgataaagccttcctcgcaaattccggatacatgaacatgtcggcgacatgattaagtattgttttttcattatttttatattttctcaacaagttctcaataccccaatagatgatagaatatcacccaatgcgtccatgttgtctatttccaacaggtcgctatatccaccaatagaagttttcccaaaaaagattctaggaacagttctaccaccagtaatttgttcaaaataatcccgcaattcattttcgggtttaaattctttaatatcgacaatttcatacgctcctcttttgaaactaaacttatttagaatatccagtgcatttctacaaaaaggacatgtatacttgacaaaaattgtcactttgttattggccaacctttgttgtacaaattcctcggccattttaatatttaagtgatataaaactatctcgacttatttaactctttagtcgagatatatggacgcagatagctatatgatagccaactacagaaggcaaacgctataaaaaacataattacgacgagcatatttataaatatttttattcagcattacttgatatagtaatattaggcacagtcaaacattcaaccactctcgatacattaactctctcattttctttaacaaattctgcaatatcttcgtaaaaagattcttgaaactttttagaatatctatcgactctagatgaaatagcgttcgtcaacatactatgttttgtatacataaaggcgcccattttaacagtttctagtgacaaaatgctagcgatcctaggatcctttagaatcacatagattgacgattcgtctctcttagtaactctagtaaaataatcatacaatctagtacgcgaaataatattatccttgacttgaggagatctaaacaatctagttttgagaacatcgataagttcatcgggaatgacatacatactatctttaatagaactcttttcatccagttgaatggattcgtccttaaccaactgattaatgagatcttctattttatcattttccagatgatatgtatgtccattaaagttaaattgtgtagcgcttctttttagtctagcagccaatactttaacatcactaatatcgatatacaaaggagatgatttatctatggtattaagaattcgtttttcgacatccgtcaaaaccaattcctttttgcctgtatcatccagttttccatcctttgtaaagaaattattttctactagactattaataagactgataaggattcctccataattgcacaatccaaactttttcacaaaactagactttacgagatctacaggaatgcgtacttcaggtttcttagcttgtgattttttcttttgcggacattttcttgtgaccaactcatctaccatttcattgattttagcagtgaaataagctttcaatgcacgggcactgatactattgaaaacgagttgatcttcaaattccgccatttaagttcaccaaacaacttttaaatacaaatatatcaatagtagtagaataagaactataaaaaaaataataattaaccaataccaaccccaacaaccggtattattagttgatgtgactgttttctcatcacttagaacagatttaacaatttctataaagtctgtcaaatcatcttccggagaccccataaatacaccaaatatagcggcgtacaacttatccatttatacattgaatattggcttttctttatcgctatcttcatcatattcatcatcaatatcaacaagtcccagattacgagccagatcttcttctacattttcagtcattgatacacgttcactatctccagagagtccgataacgttagccaccacttctctatcaatgattagtttcttgagtgcgaatgtaatttttgtttccgttccggatctatagaagacgataggtgtgataattgccttggccaattgtctttctcttttactgagtgattctagttcaccttctatagatctgagaatggatgattctccagccgaaacatattctaccatggctccgtttaatttgttgatgaagatggattcatccttaaatgttttctctgtaatagtttccaccgaaagactatgcaaagaatttggaatgcgttccttgtgcttaatgtttccatagacggcttctagaagttgatacaacataggactagccgcggtaacttttatttttagaaagtatccatcgcttctatcttgtttagatttatttttataaagtttagtctctccttccaacataataaaagtggaagtcatttgactagataaactatcagtaagttttatagagatagacgaacaattagcgtattgagaagcatttagtgtaacgtattcgatacattttgcattagatttactaatcgattttgcatactctataacacccgcacaagtctgtagagaatcgctagatgcagtaggtcttggtgaagtttcaactctcttcttgattaccttactcatgattaaacctaaataattgtactttgtaatataatgatatatattttcactttatctcatttgagaataaaaatgtttttgtttaaccactgcatgatgtacagatttcggaatcgcaaaccaccagtggttttattttatccttgtccaatgtgaattgaatgggagcggatgcgggtttcgtacgtagatagtacattcccgtttttagaccgagactccatccgtaaaaatgcatactcgttagtttggaataactcggatctgctatatggatattcatagattgactttgatcgatgaaggctcccctgtctgcagccatttttatgatcgtcttttgtggaatttcccaaatagttttataaactcgcttaatatcttctggaaggtttgtattctgaatggatccaccatctgccataatcctattcttgatctcatcattccataattttctctcggttaaaactctaaggagatgcggattaactacttgaaattctccagacaatactctccgagtgtaaatattactggtatacggttccaccgactcattatttcccaaaatttgagcagttgatgcagtcggcataggtgccaccaataaactatttctaagaccgtatgttctgattttatcttttagaggttcccaattccaaagatccgacggtacaacattccaaagatcatattgtagaataccgttactggcgtacgatcctacatatgtatcgtatggtccttccttctcagctagttcacaactcgcctctaatgcaccgtaataaatggtttcgaagatcttcttatttagatcttgtgcttccaggctatcaaatggataatttaagagaataaacgcgtccgctaatccttgaacaccaataccgataggtctatgtctcttattagagatttcagcttctggaataggataataattaatatctataattttattgagatttctgacaattactttgaccacatccttcagtttgagaaaatcaaatcgcccatctattacaaacatgttcaaggcaacagatgccagattacaaacggctacctcattagcatccgcatattgtattatctcagtgcaaagattactacacttgatagttcctaaattttgttgattactctttttgttacacgcatccttataaagaatgaatggagtaccagtttcaatctgagattctataatcgctttccagacgactcgagcctttattatagatttgtatctcctttctctttcgtatagtgtatacaatcgttcgaactcgtctccccaaacattgtccaatccaggacattcatccggacacatcaacgaccactctccgtcatccttcactcgtttcataaagagatcaggaatccaaagagctataaatagatctctggttctatgttcctcgtttcctgtattctttttaagatcgaggaacgccataatatcagaatgccacggttccaagtatatggccataactccaggccgtttgtttcctccctgatctatgtatctagcggtgttattataaactctcaacattggaataataccgtttgatataccattggtaccggagatatagcttccactggcacgaatattactaattgatagacctattccccctgccattttagagattaatgcgcatcgttttaacgtgtcatagataccctctatgctatcatcgatcatgttaagtaaaaaacagctagacatttggtgacgactagttcccgcattaaataaggtaggagaagcgtgcgtaaaccatttttcagaaagtagattgtacgtctcaatagctgagtctatatcccattgatgaattcctactgcgacacgcattaacatgtgctgaggtctttcaacgatcttgttgtttattttcaacaagtaggatttttccaaagttttaaaaccaaaatagttgtatgaaaagtctcgttcgtaaataataaccgagttgagtttatccttatatttgttaactatatccatggtgatacttgaaataatcggagaatgtttcccatttttaggattaacatagttgaataaatcctccatcacttcactaaatagtttttttgtttccttgtgtagatttgatacggctattctggcggctagaatggcataatccggatgttgtgtagtacaagtggctgctatttcggctgccagagtgtccaattctaccgttgttactccattatatattccttgaataaccttcatagctattttaataggatctatatgatccgtgtttaagccataacataattttctaatacgagacgtgattttatcaaacatgacattttccttgtatccatttcgtttaatgacaaacatttttgttggtgtaataaaaaaattatttaacttttcattaatagggatttgacgtatgtagcgtacaaaattatcgttcctggtatatagataaagagtcctatatatttgaaaatcgttacggctcgattaaactttaatgattgcatagtgaatatatcattaggatttaactccttgactatcatggcggcgccagaaattaccatcaaaagcattaatacagttatgccgatcgcagttagaacggttatagcatccaccatttatatctaaaaattagatcaaagaatatgtgacaaagtcctagttgtatactgagaattgacgaaacaatgtttcttacatatttttttcttattagtaactgacttaatagtaggaactggaaagctagacttgattattctataagtatagatacccttccagataatgttctctttgataaaagttccagaaaatgtagaattttttaaaaagttatcttttgctattaccaagattgtgtttagacgcttattattaatatgagtaatgaaatccacaccgcctctagatatcgcctttatttccacattagatggtaaatccaatagtgaaactatctttttaggaatgtatggactcgcgtttagaggagtgaacgtcttgggcgtcggaaaggatgattcgtcaaacgaataaacaatttcacaaatggatgttaatgtattagtaggaaatttcttgacgctagtggagttgaagattctaatggatgatgttctacctatttcatccgataacatgttaatttccgacaccaacggttttaatatttcgatgatatacggtagtctctctttcggacttatatagcttattccacaatacgagtcattatatactccaaaaaacaaaataactagtataaaatctgtatcgaatgggaaaaacgaaattatcgacataggtatagaatccggaacattgaacgtattaatacttaattctttttctgtggtaagtaccgataggttattgacattgtatggttttaaatattctataacttgagacttgatagatattagtgatgaattgaaaattatttttatcaccacgtgtgtttcaggatcatcgtcgacgcccgtcaaccaaccgaatggagtaaaataaatatcattaatatatgctctagatattagtatttttatcaatcctttgattatcatcttctcgtaggcgaatgattccatgatcaagagtgatttaagaacatcctccggagtattaatgggcttagtaaacagtccatcgttgcaataataaaagttatccaagttaaaggatattatgcattcgtttaaagatatcacctcatctgacggagacaattttttggtaggttttagagactttgaagctacttgtttaacaaagttattcatcgtcgtctactattctatttaattttgtagttaatttatcacatatcacattaattgactttttggtccatttttccatacgtttatattcttttaatcctgcgttatccgtttccgttatatccagtgatagatcgtgcaggttaaatagaatgctcttaaataatgtcatttttttatccgctaaaaatttaaagaatgtataaacctttttcagagatttgaaactcttaggtggtgtcctagtacacaatatcataaacaaactaataaacattccacattcagattccaacagctgattaacttccacattaatacagcctattttcgctccaaatgtacattcgaaaaatctgaataaaacatcgatgtcacaatttgtattatccaatacagaatgtctgtgattcgtgttaaaaccatcggagaaggaatagaaataaaaattattatagtggtggaattcagttggaatattgcctccggagtcataaaaggatactaaacattgttttttatcataaattacacatttccaatgagacaaataacaaaatccaaacattacaaatctagaggtagaacttttaattttgtctttaagtatatacgataagatatgtttattcataaacgcgtcaaatttttcatgaatcgctaaggagtttaagaatctcatgtcaaattgtcctatataatccacttcggatccataagcaaactgagagactaagttcttaatacttcgattgctcatccaggctcctctctcaggctctattttcatcttgacgacctttggattttcaccagtatgtattcctttacgtgataaatcatcgattttcaaatccatttgtgagaagtctatcgccttagatactttttcccgtagtcgaggtttaaaaaaatacgctaacggtatactagtaggtaactcaaagacatcatatatagaatggtaacgcgtctttaactcgtcggttaactctttcttttgatcgagttcgtcgctactattgggtctgctcaggtgccccgactctactagttccaacatcataccgataggaatacaagacactttgccggcggttgtagatttatcatatttctccactacatatccgttacaatttgttaaaaatttagatacatctatattgctacataatccagctagtgaatatatatgacataataaattggtaaatcctagttctggtattttactaattactaaatctgtatatctttccatttatcatggaaaagaatttaccagatatcttcttttttccaaactgcgttaatgtattctcttacaaatattcacaagatgaattcagtaatatgagtaaaacggaacgtgatagtttctcattggccgtgtttccagttataaaacatagatggcataacgcacacgttgtaaaacataaaggaatatacaaagttagtacagaagcacgtggaaaaaaagtatctcctccatcactaggaaaacccgcacacataaacctaaccacgaaacaatatatatacagtgaacacacaataagctttgaatgttatagttttctaaaatgtataacaaatacagaaatcaattcgttcgatgagtatatattaagaggactattagaagctggtaatagtttacagatattttccaattccgtaggtaaacgaacagatactataggtgtactagggaataagtatccatttagcaaaattccattggcctcattaactcctaaagcacaacgagagatattttcagcgtggatttctcatagacctgtagttttaactggaggaactggagtgggtaagacgtcacaggtacccaagttattgctttggtttaattatttatttggtggattctctactctagataaaatcactgactttcacgaaagaccagtcattctatctcttcctaggatagctttagttagattgcatagcaataccattttaaaatcattgggatttaaggtactagatggatctcctatttctttacggtacggatctataccggaagaattaataaacaaacaaccaaaaaaatatggaattgtattttctacccataagttatctctaacaaaactatttagttatggcactcttattatagacgaagttcatgagcatgatcaaataggagatattattatagcagtagcgagaaagcatcatacgaaaatagattctatgtttttaatgactgccacgttagaggatgacagggaacggctaaaagtatttttacctaatcccgcatttatacatattcctggagatacactgtttaaaattagcgaggtatttattcataataagataaatccatcttccagaatggcatacatagaagaagaaaagagaaatttagttactgctatacagatgtatactcctcctgatggatcatccggtatagtctttgtggcatccgttgcacagtgtcacgaatataaatcatatttagaaaaaagattaccgtatgatatgtatattattcatggtaaggtcttagatatagacgaaatattagaaaaagtgtattcatcacctaatgtatcgataattatttctactccttatttggaatccagcgttactatacgcaatgttacacacatttatgatatgggtagagtttttgtccccgctccttttggaggatcgcaagaatttatttctaaatctatgagagatcaacgaaaaggaagagtaggaagagttaatcctgggacatacgtatatttctatgatctgtcttatatgaagtctatacagcgaatagattcagaatttctacataattatatattgtacgctaataagtttaatctaacactccccgaagatttgtttataatccctacaaatttggatattctatggcgtacaaaggaatatatagactcgttcgatattagtacagaaacatggaataaattattatccaattattatatgaagatgatagagtatgctaaactttatgtactaagtcctattctcgctgaggagttggataactttgagaggacgggagaattaactagtattgtacgagaagccattttatctctaaatttacgaattaagattttaaattttaaacataaagatgatgatacgtatatacacttttgtaaaatattattcggtgtctataacggaacaaacgctactatatattatcatagacctctaacgggatatatgaatatgatttcagatactatatttgttcctgtagataataactaaaaatcaaactctaatgaccacatctttttttagagatgaaaaattttccacatctccttttgtagacacgactaaacattttgcagaaaaaagtttattagtgtttagataatcgtatacttcatcagtgtagatagtaaatgtgaacagataaaaggtattcttgctcaatagattggtaaattccatagaatatattaatcctttcttcttgagatcccacatcatttcaaccagagacgttttatccaatgatttacctcgtactataccacatacaaaactagattttgcagtgacgtcgtacctggtattcctaccaaacaaaattttacttttagttcttttagaaaattctaaggtagaatctctatttgccaatatgtcatctatggaattaccactagcaaaaaatgatagaaatatatattgatacatcgcagctggttttgatctactatactttaaaaacgaatcagattccataattgcctgtatatcatcagctgaaaaactatgttttacacgtattccttcggcatttctttttaatgatatatcttgtttagacaatgataaagttatcatgtccatgagagacgcgtctccgtatcgtataaatatttcattagatgttagacgcttcattaggggtatacttctataaggtttcttaatcagtccatcattggttgcgtcaagaactactatcggatgttgttgggtatctctagtgttacacatggccttactaaagtttgggtaaataactatgatatctctattaattatagatgcatatatttcattcgtcaaggatattagtatcgacttgctatcgtcattaatacgtgtaatgtaatcatataaatcatgcgatagccaaggaaaattcaaatagatgttcatcatataatcgtcgctataattcatattaatactttgacattgactaatttgtaatatagcctcgccacgaagaaagctctcgtattcagtttcatcgataaaggataccgttaaatataactggttgccgatagtctcatagtctattaagtggtaagtttcgtacaaatacagaatccctaaaatattatctaatgttggattaatctttaccataactgtataaaatggagacggagtcataactattttaccgtttgtacttactggaatagatgaaggaataatctccggacatgctggtaaagacccaaatgtctgtttgaagaaatccaatgttccaggtcctaatctcttaacaaaaattacgatattcgatcccgatatcctttgcattctatttaccagcatatcacgaactatattaagattatctatcatgtctattctcccaccgttatataaatcgcctccgctaagaaacgttagtatatccatacaatggaatacttcatttctaaaatagtattcgttttctaattctttaatgtgaaatcgtatactagaaagggaaaaattatctttgagttttccgttagaaaagaaccacgaaactaatgttctgattgcgtccgattccgttgctgaattaatggatttacaccaaaaactcatataacttctagatgtagaagcattcgctaaaaaattagtagaatcaaaggatataagtagatgttccaacaagtgagcaattcccaagatttcatctatatcattctcgaatccgaaattagaaattcccaagtagatatcctttttcatccgatcattgatgaaaatacgaactttattcggtaagacaatcatttactaaggagtaaaataggaagtaatgttcgtatgtcgttatcatcgtataaattaaaggtgtgttttttaccattaagtgacattataattttaccaatattggaattataatataggtgtatttgcgcactcgcgacggttgatgcatcggtaaatatagctgtatctaatgttctagtcggtatttcatcatttcgctgtctaataatagcgttttctctatctgtttccattacagctgcctgaagtttattggtcggataatatgtaaaataataagaaatacatacgaataacaaaaataaaataagatataataaagatgccatttagagatctaattttgttcaacttgtccaaattcctacttacagaagatgaggaatcgttggagatagtgtcttccttatgtagaggatttgaaatatcttatgatgacttgataacttactttccagataggaaataccataaatatatttctaaagtatttgaacatgtagatttatcggaggaattaagtatggaattccatgatacaactttgcgagatttagtttatcttagattgtacaagtattccaagtgtatacggccgtgttataaattaggagataatctaaaaggcatagttgttataaaggacaggaatatttatattagggaagcaaatgatgacttgatagaatatctcctcaaggaatacactcctcagatttatacatattctaatgagcgcgtccccataactggttcaaaattaattctttgtggattttctcaagttacatttatggcgtatacaacgtcgcatataacaacaaataaaaaggtagatgttctcgtttccaaaaaatgtatagatgaactagtcgatccaataaattatcaaatacttcaaaatttatttgataaaggaagcggaacaataaacaaaatactcaggaagatattttattcggtaacaggtggccaaactccataggtagctttttctatttcggattttagaatttccaaattcaccagcgatttatcggttttggtgaaatccaaggatttattaatgtccacaaatgccatttgttttgtctgtggattgtatttgaaaatggaaacgatgtagttagatagatgcgctgcgaagtttcctattagggttccgcgcttcacgtcacccagcatacttgaatcaccatcctttaaaaaaaatgataagatatcaacatggagtatatcatactcggattttaattcttctactgcatcactgacattttcacaaatactacaatacggtttaccgaaaataatcagtacgttcttcatttatgggtatcaaaaacttaaaatcgttactgctggaaaataaatcactgacgatattagatgataatttatacaaagtatacaatggaatatttgtggatacaatgagtatttatatagccgtcgccaattgtgtcagaaacttagaagagttaactacggtattcataaaatacgtaaacggatgggtaaaaaagggagggcatgtaaccctttttatcgatagaggaagtataaaaattaaacaagacgttagagacaagagacgtaaatattctaaattaaccaaggacagaaaaatgctagaattagaaaagtgtacatccgaaatacaaaatgttaccggatttatggaagaagaaataaaggcagaaatgcaattaaaaatcgataaactcacatttcaaatatatttatctgattctgataacataaaaatatcattgaatgagatactaacacatttcaacaataatgagaatgttacattattttattgtgatgaacgagacgcagaattcgttatgtgtctcgaggctaaaacacatttctctaccacaggagaatggccgttgataataagtaccgatcaggatactatgctatttgcatctactgataatcatcctaagatgataaaaaacttaactcaactgtttaaatttgttccctcggcagaggataactatttagcaaaattaacggcgttagtgaatggatgtgatttctttcctggactctatggggcatctataacacccaacaacttaaacaaaatacaattgtttagtgattttacaatcgataatatagtcactagtttggcaattaaaaattattatagaaagactaactctaccgtagacgtgcgtaatattgttacgtttataaacgattacgctaatttagacgatgtctactcgtatgttcctccttgtcaatgcactgttcaagaatttatattttccgcattagatgaaaaatggaacaattttaaatcatcttatttagagaccgttccgttaccctgtcaattaatgtacgcgttagaaccacgcaaggagattgatgtttcagaagttaaaactttatcatcttatatagatttcgaaaatactaaatcagatatcgatgttataaaatctatatcctcgatcttcggatattctaacgaaaactgtaacacgatagtattcggcatctataaggataatttactactgagtataaataattcattttactttaacgatagtctgttaataaccaatactaaaagtgataatataataaatataggttactagattaaaaatggtgttccaactcgtgtgctctacatgcggtaaagatatttctcacgaacgatataaattgattatacgaaaaaaatcattaaaggatgtactcgtcagtgtaaagaacgaatgttgtaggttaaaattatctacacaaatagaacctcaacgtaacttaacagtgcaacctctattggatataaactaatatggatccggttaattttatcaagacatatgcgcctagaggttctattatttttattaattataccatgtcattaacaagtcatttgaatccatcgatagaaaaacatgtgggtatttattatggtacgttattatcggaacacttggtagttgaatctacctatagaaaaggagttcgaatagtcccattggatagtttttttgaaggatatcttagtgcaaaagtatacatgttagagaatattcaagttatgaaaatagcagctgatacgtcattaactttattgggtattccgtatggatttggtcataatagaatgtattgttttaaattggtagctgactgttataaaaatgccggtgttgaaacatcgtctaaacgaatattaggtaaagatatttttctgagccaaaacttcacagacgataatagatggataaagatatatgattctaataatttaacattttggcaaattgattaccttaaagggtgagttaatatgcataactactcctccgttgttttttcccacgttctttttcttaacgttgtttgccatcactctcataatgtaaagatattctaaaatggtaaacttttgcatatcggacgcagaaattggtataaatgttgtaattgtattatttcccgtcaatggactagtcacagctccatcagttttatatcctttagagtatttctcactcgtgtctagcattctagagcattccatgatctgtttatcgttgatattggccggaaagatagattttttattttttattatattactattggcaattgtagatataacttctggtaaatatttttctaccttttcaatttcttctattttcaagccggctatatattctgctatattgttgctagtatcaataccttttctggctaagaagtcatatgtggtattcactatatcagttttaactggtagttccattagcctttccacttctgcagaataatcagaaattggttctttaccagaaaatccagctactataataggctcaccgatgatcattggcaaaatcctatattgtaccagattaatgagagcatatttcatttccaataattctgctagttcttgagacattgatttatttgatgaatctagttggttctctagatactctaccatttctgccgcatacaataacttgttagataaaatcagggttatcaaagtgtttagcgtggctagaatagtgggcttgcatgtattaaagaatgcggtagtatgagtaaaccgttttaacgaattatatagtctccagaaatctgtggcgttacatacatgagccgaatgacatcgaagattgtccaatatttttaatagctgctctttgtccattatttctatatttgactcgcaacaattgtagataccattaatcactgattcctttttcgatgccggacaatagcacaattgtttagctttggactctatgtattcagaattaatagatatatctcttaatacagattgcactatacattttgaaactatgtcaaaaattgtagaacgacgctgttctgcagccatttaactttaaataatttacaaaaatttaaaatgagcatccgtataaaaatcgataaactgcgccaaattgtggcatatttttcagagttcagtgaagaagtgtctataaatgtagactcgacggatgagttaatgtatatttttgccgccttgggcggatctgtaaacatttgggccattatacctctcagtgcatcagtgttctaccgaggagccgaaaacattgtgtttaatcttcctgtgtccaaggtaaaatcgtgtttgtgtagttttcacaatgatgccatcatagatatagaacctgatctggaaaataatctagtaaaactttctagttatcatgtagtaagtgtcgattgtaataaggaactgatgcctattaggacagatactactatttgtctaagtatagatcaaaagaaatcttatgtgtttaattttcacaagtatgaagaaaaatgttgtggtagaaccgtcattcatttagaatggttgttgggctttatcaagtgtattagtcagcatcagcatctggctattatgtttaaagatgacaatattattatgaagactcctggtaatactgatgcattttccagggaatattctatgactgaatgttctcaagaactacaaaagttttctttcaaaatagctatctcgtctctcaacaaactacgaggattcaaaaagagagtcaatgtttttgaaactagaatcgtaatggataatgacgataacattctaggaatgttgttttcggatagagttcaatcctttaagatcaacatctttatggcgtttttagattaatactttcaatgagataaatatgggtggcggagtaagtgttgagctccctaaacgggatccgcctccgggagtacccactgatgagatgttattaaacgtggataaaatgcatgacgtgatagctcccgctaagcttttagaatatgtgcatataggaccactagcaaaagataaagaggataaagtaaagaaaagatatccagagtttagattagtcaacacaggacccggtggtctttcggcattgttaagacaatcgtataatggaaccgcacccaattgctgtcgcacttttaatcgtactcattattggaaaaaggatggaaagatatcagataagtatgaagagggtgcagtattagaatcgtgttggccagacgttcacgacactggaaaatgcgatgttgatttattcgactggtgtcagggggatacgttcgatagaaacatatgccatcagtggatcggttcagcctttaataggagtaatagaactgtagagggtcaacaatcgttaataaatctgtataataagatgcaaacattatgtagtaaagatgctagtgtaccaatatgtgaatcatttttgcatcatttacgcgcacacaatacagaagatagcaaagagatgatcgattatattctaagacaacagtctgcggactttaaacagaaatatatgagatgtagttatcccactagagataagttagaagagtcattaaaatatgcggaacctcgagaatgttgggatccagagtgttcgaatgccaatgttaatttcttgctaacacgtaattataataatttaggactttgcaatattgtacgatgtaatactagcgtgaacaacttacagatggataaaacttcctcattaagattgtcatgtggattaagcaatagtgatagattttctactgttcccgtcaatagagcaaaagtagttcaacataatattaaacactcgttcgacctaaaattgcatttgatcagtttattatctctcttggtaatatggatactaattgtagctatttaaatgggtgccgcagcaagcatacagacgacggtgaatacactcagcgaacgtatctcgtctaaattagaacaagaagcgaatgctagtgctcaaacaaaatgtgatatagaaatcggaaatttttatatccgacaaaaccatggatgtaacctcactgttaaaaatatgtgctctgcggacgcggatgctcagttggatgctgtgttatcagccgctacagaaacatatagtggattaacaccggaacaaaaagcatacgtgccagctatgtttactgctgcgttaaacattcagacgagtgtaaacactgttgttagagattttgaaaattatgtaaaacaaacttgtaattctagcgcggtcgtcgataacaaattaaagatacaaaacgtaatcatagatgaatgttacggagccccaggatctccaacaaatttggaatttattaatacaggatctagcaaaggaaattgtgccattaaggcgttgatgcaattgactactaaggccactactcaaatagcacctagacaagttgctggtacaggagttcagttttatatgattgttatcggtgttataatattggcagcgttgtttatgtactatgccaagcgtatgctgttcacatccaccaatgataaaatcaaacttattttagccaataaggaaaacgtccattggactacttacatggacacattctttagaacttctccgatggttattgctaccacggatatgcaaaactgaaaatatattgataatattttaatagattaacatggaagttatcgctgatcgtctagacgatatagtgaaacaaaatatagcggatgaaaaatttgtagattttgttatacacggtctagagcatcaatgtcctgctatacttcgaccattaattaggttgtttattgatatactattatttgttatagtaatttatatttttacggtacgtctagtaagtagaaattatcaaatgttgttggcgttggtggcgctagtcatcacattaactattttttattactttatactataatagtactagactgacttctaacaaacatctcacctgccataaataaatgcttgatattaaagtcttctatttctaacactattccatctgtggaaaataatactctgacattatcgctaattgacacatcggtgagtgatatgcctataaagtaataatcttctttgggcacatataccagtgtaccaggttctaacaacctatttactggtgctcctgtagcatactttttctttaccttgagaatatccatcgtttgcttggtcaatagcgatatgtgattttttatcaaccactcgaaaaagtaattggagtgttcatatcctctacgggctattgtctcatggccgtgtatgaaatttaagtaacacgactgtggtagatttgttctatagagccggttgccgcaaatagatagaactaccaatatgtctgtacaaatgttaaacattaattgattaacagaaaaaacaatgttcgttctgggaatagaaaccagatcaaaacaaaattcgttagaatatatgccacgtttatacattgaatataaaataactacagtttgaaaaataacagtatcatttaaacatttaacttgcggggttaatttcacaactttactgtttttaagctgttcaaaatatagcatcgatccatgagaaatacgtttagccgcctttaatagaggaaatcccaccgcctttctggatctcaccaacgacgatagttctgaccagcaactcatttcttcatcatccacctgttttaacatataataggcaggagatagatatccgtcattgcaatattccttttcgtaggcacacaatctaatattgataaaatctccattctcttctctgcatttattatcttgtttcggtggctgattaggctgtagtcttggtttaggccttggtctatcgttgttgaatctattttggtcattaaatctttcatttcttcctggtatatttctatcacctcgtttggttggatttttgtctatattatcgtttgtaacatcggtacgggtattcatttatcacaaaaaaaacttctctaaatgagtctactgctagaaaacctcatcgaagaagataccatattttttgcaggaagtatatctgagtatgatgatttacaaatggttattgccggcgcaaaatccaaatttccaagatctatgctttctatttttaatatagtacctagaacgatgtcaaaatatgagttggagttgattcataacgaaaatatcacaggagcaatgtttaccacaatgtataatataagaaacaatttgggtctaggagatgataaactaactattgaagccattgaaaactatttcttggatcctaacaatgaagttatgcctcttattattaataatacggatatgactgccgtcattcctaaaaaaagtggtaggagaaagaataagaacatggttatcttccgtcaaggatcatcacctatcttgtgcattttcgaaactcgtaaaaagattaatatttataaagaaaatatggaatccgcatcgactgagtatacacctatcggagacaacaaggctttgatatctaaatatgcgggaattaatgtcctgaatgtgtattctccttccacatccatgagattgaatgccatttacggattcaccaataaaaataaactagagaaacttagtactaataaggaactagaatcgtatagttctagccctcttcaagaacccattaggttaaatgattttctgggactattggaatgtgttaaaaagaatattcctctaacagatattccgacaaaggattgattactataaatggagaatgttcctaatgtatactttaatcctgtgtttatagagcccacgtttaaacattctttattaagtgtttataaacacagattaatagttttatttgaagtattcgttgtattcattctaatatatgtattttttagatctgaattaaatatgttcttcatgcctaaacgaaaaatacccgatcctattgatagattacgacgtgctaatctagcgtgtgaagacgataaattaatgatctatggattaccatggatgacaactcaaacatctgcgttatcaataaatagtaaaccgatagtgtataaagattgtgcaaagcttttgcgatcaataaatggatcacaaccagtatctcttaacgatgttcttcgcagatgatgattcattttttaagtatttggctagtcaagatgatgaatcttcattatctgatatattgcaaatcactcaatatctagactttctgttattattattgatccaatcaaaaaataaattagaagccgtgggtcattgttatgaatctctttcagaggaatacagacaattgacaaaattcacagactctcaagattttaaaaaactgtttaacaaggtccctattgttacagatggaagggtcaaacttaataaaggatatttgttcgactttgtgattagtttgatgcgattcaaaaaagaatcctctctagctaccaccgcaatagatcctattagatacatagatcctcgtcgcgatatcgcattttctaacgtgatggatatattaaagtcgaataaagtgaacaataattaattctttattgtcatcatgaacggcggacatattcagttgataatcggccccatgttttcaggtaaaagtacagaattaattagacgagttagacgttatcaaatagctcaatataaatgcgtgactataaaatattctaacgataatagatacggaacgggactatggacgcatgataagaataattttgaagcattggaagcaactaaactatgtgatgtcttggaatcaattacagatttctccgtgataggtatcgatgaaggacagttctttccagacattgttgaattctgtgagcgtatggcaaacgaaggaaaaatagttatagtagccgcactcgatgggacatttcaacgtaaaccgtttaataatattttgaatcttattccattatctgaaatggtggtaaaactaactgctgtgtgtatgaaatgctttaaggaggcttccttttctaaacgattgggtgaggaaaccgagatagaaataataggaggtaatgatatgtatcaatcggtgtgtagaaagtgttacatcgactcataatattatattttttatctaaaaaactaaaaataaacattgattaaattttaatataatacttaaaaatggatgttgtgtcgttagataaaccgtttatgtattttgaggaaattgataatgagttagattacgaaccagaaagtgcaaatgaggtcgcaaaaaaactgccgtatcaaggacagttaaaactattactaggagaattattttttcttagtaagttacagcgacacggtatattagatggtgccaccgtagtgtatataggatcggctcctggtacacatatacgttatttgagagatcatttctataatttaggaatgattatcaaatggatgctaattgacggacgccatcatgatcctattctaaatggattgcgtgatgtgactctagtgactcggttcgttgatgaggaatatctacgatccatcaaaaaacaactgcatccttctaagattattttaatttctgatgtaagatccaaacgaggaggaaatgaacctagtacggcggatttactaagtaattacgctctacaaaatgtcatgattagtattttaaaccccgtggcatctagtcttaaatggagatgcccgtttccagatcaatggatcaaggacttttatatcccacacggtaataaaatgttacaaccttttgctccttcatattcagctgaaatgagattattaagtatttataccggtgagaacatgagactgactcgagttaccaaatcagacgttgtaaattatgaaaaaaagatgtactaccttaataagatcgtccgtaacaaagtagttgttaactttgattatcctaatcaggaatatgactattttcacatgtactttatgctgaggaccgtgtactgcaataaaacatttcctactactaaagcaaaggtactatttctacaacaatctatatttcgtttcttaaatattccaacaacatcaactgaaaaagttagtcatgaaccaatacaacgtaaaatatctagcaaaaattctatgtctaaaaacagaaatagcaagagatccgtacgcggtaataaatagaaacgtactactgagatatactaccgatatagagtataatgatttagttactttaataaccgttagacataaaattgattctatgaaaactgtgtttcaggtatttaacgaatcatccataaattatactccggttgatgatgattatggagaaccaatcattataacatcgtatcttcaaaaaggtcataacaagtttcctgtaaattttctatacatagatgtggtaatatctgacttatttcctagctttgttagactagatactacagaaactaatatagttaatagtgtactacaaacaggcgatggtaaaaagactcttcgtcttcccaaaatgttagagacggaaatagttgtcaagattctctatcgccctaatataccattaaaaattgttagatttttccgcaataacatggtaactggagtagagatagccgatagatctgttatttcagtcgctgattaatcaattagtagagatgagataagaacattataataatcaataatatatcttatatcttatatcttatatcttgtttagaaaaatgctaatattaaaatagctaacgctagtaatccaatcggaagccatttgatatctataatagggtatctaatttcctgatttaaatagcggacagctatattctcggtagctactcgtttggaatcacaaacattatttacatctaatttactatctgtaatggaaacgtttcccaatgaaatggtacaatccgatacattgcattttgttatatttttttttaaagaggctggtaacaacgcatcgcttcgtttacatggctcgtaccaacaataatagggtaatcttgtatctattcctatccgtactatgcttttatcaggataaatacatttacatcgtatatcgtctttgttagcatcacagaatgcataaatttgttcgtccgtcatgataaaaatttaaagtgtaaatataactattatttttatagttgtaataaaaagggaaatttgattgtatactttcggttctttaaaagaaactgacttgataaaaatggctgtaatctctaaggttacgtatagtctatatgatcaaaaagagattaatgctacagatattatcattagtcatgttaaaaatgacgacgatatcggtaccgttaaagatggtagactaggtgctatggatggggcattatgtaagacttgtgggaaaacggaattggaatgtttcggtcactggggtaaagtaagtatttataaaactcatatagttaagcctgaatttatttcagaaattattcgtttactgaatcatatatgtattcactgcggattattgcgttcacgagaaccgtattccgacgatattaacctaaaagagttatcgggacacgctcttaggagattaaaggataaaatattatccaagaaaaagtcatgttggaacagcgaatgtatgcaaccgtatcaaaaaattactttttcaaagaaaaaggtttgtttcgtcaacaagttggatgatattaacgttcctaattctctcatctatcaaaagttaatttctattcatgaaaagttttggccattattagaaattcatcaatatccagctaacttattttatacagactactttcccatccctccgctgattattagaccggctattagtttttggatagatagtatacccaaagagaccaatgaattaacttacttattaggtatgatcgttaagaattgtaacttgaatgctgatgaacaggttatccagaaggcggtaatagaatacgatgatattaaaattatttctaataacacttccagtatcaatttatcatatattacatccggcaaaaataatatgattagaagttatattgtcgcccgacgaaaagatcagaccgctagatctgtaattggtcccagtacatctatcaccgttaatgaggtaggaatgcccgcatatattagaaatacacttacagaaaagatatttgttaatgcctttacagtggataaagttaaacaactattagcgtcaaaccaagttaaattttactttaataaacgattaaaccaattaacaagaatacgccaaggaaagtttattaaaaataaaatacatttattgcctggtgattgggtagaagtagctgttcaagaatatacaagtattatttttggaagacagccgtctctacatagatacaacgtcatcgcttcatctatcagagctaccgaaggagatactatcaaaatatctcccggaattgccaactctcaaaatgctgatttcgacggagatgaagaatggatgatattggagcaaaatcctaaagccgtaattgaacaaagtattcttatgtatccgacgacgttactcaaacacgatattcatggagcccccgtttatggatctattcaagatgaaatcgtagcagcgtattcattgtttagaatacaagatctttgtttagatgaagtattgaacatcttggggaaatatggaagaaagttcgatcctaaaggtaaatgtaaattcagcggtaaagatatctatacttacttgataggtgaaaagattaattatccgggtctcttaaaggatggtgaaattattgcaaacgacgtagatagtaattttgttgtggctatgaggcatctgtcattggctggactcttatccgatcataagtcgaacgtggaaggtatcaactttattatcaagtcatcttatgtttttaagagatatctatctatttacggttttggggtgacattcaaagatctgagaccaaattcgacgttcactaataaattggaggccatcaacgtagaaaaaatagaacttatcaaagaagcatacgccaaatatctcaacgatgtaagagacgggaaaatagttccattatctaaagctttagaggcggactatgtggaatccatgttatccaacttgacaaatcttaatatccgagagatagaagaacatatgagacaaacgctgatagatgatccagataataacctcctgaaaatggccaaagcgggttataaagtaaatcccacagaactaatgtatattctaggtacttatggacaacagaggattgatggtgaaccagcagagactcgagtattgggtagagtcttaccttactatcttccagactctaaggatccagaaggaagaggttatattcttaattctttaacaaaaggattaacaggttctcaatattacttttcgatgctggttgccagatctcaatctactgatatcgtctgtgaaacatcacgtaccggaacactggctagaaaaatcattaaaaagatggaggatatggtggtcgacggatacggacaagtagttataggtaatacgctcatcaagtacgccgccaattataccaaaattctaggctcagtatgtaaacctgtagatcttatctatccagatgagtccatgacttggtatttggaaattagtgctctgtggaataaaataaaacagggattcgtttactctcagaaacagaaacttgcaaaaaagacattggcgccgtttaatttcctagtattcgtcaaacccaccactgaggataatgctattaaggttaaggatctgtacgatatgattcataacgtcattgatgatgtgagagagaaatacttctttacggtatctaatatagattttatggagtatatattcttgacgcatcttaatccttctagaattagaattacaaaagaaacggctatcactatctttgaaaagttctatgaaaaactcaattatactctaggtggtggaactcctattggaattatttctgcacaggtattgtctgagaagtttacacaacaagccctgtccagttttcacactactgaaaaaagtggtgccgtcaaacaaaaacttggtttcaacgagtttaataacctgactaatttgagtaagaataagaccgaaattatcactctggtatccgatgatatctctaaacttcaatctgttaagattaatttcgaatttgtatgtttgggagaattaaatccaaacatcactcttcgaaaagaaacagataggtatgtagtagatataatagtcaatagattatacatcaagagagcagaaattaccgaattagtcgtcgaatatatgattgaacgatttatctcctttagcgtcattgtaaaggaatggggtatggagacattcattgaggacgaggataatattagatttactgtctacctaaatttcgttgaaccggaagaattgaatcttagtaagtttatgatggttcttccgggtgccgccaacaagggcaagattagtaaattcaagattcctatctctgactatacgggatatgacgacttcaatcaaacaaaaaagctcaataagatgactgtagaactcatgaatctaaaagaattgggttctttcgatttggaaaacgtcaacgtgtatcctggagtatggaatacatacgatatcttcggtatcgaggccgctcgtgaatacttgtgcgaagccatgttaaacacctatggagaagggttcgattatctgtatcagccttgtgatcttctcgctagtttactatgtgctagttacgaaccagaatcagtgaataaattcaagttcggcgcagctagtactcttaagagagctacgttcggagacaataaagcattgttaaacgcggctcttcataaaaagtcagaacctattaacgataatagtagctgccacttttttagcaaggtccctaatataggaactggatattacaaatactttatcgacttgggtcttctcatgagaatggaaaggaaactatctgataagatatcttctcaaaagatcaaggaaatggaagaaacagaagacttttaattcttatcaataacatatttttctatgatctgtcttttaaacgatggattttccacaaatgcgcctctcaagtccctcatagaatgatacacgtataaaaaatatagcataggcgatgactccttatttttagacattagatatgccaaaatcatagccccgcttctatttactcccgcagcacaatgaaccaacacgggctcgtttcgttgatcacatttagataaaaaggcggtcacgtcgtcaaaatatttactaatatcggtagttgtatcatctaccaacggtatatgaataatattaatattagagttaggcaatgtatatttatccatcgtcaaatttaaaacatatttgaacttaacttcagatgatggtgcatccatagcatttttataatttcccaaatacacattattggttacccttgtcattatagtgggagatttggctttgtgcatatctccagttgaacgtagtagtaagtatttatacaaacttttcttatccatttataacgtacaaatggataaaactactttatcggtaaacgcgtgtaatttagaatacgttagagaaaaggctatagtaggcgtacaagcagccaaaacatcaacacttatattctttgttattatattggcaattagtgcgctattactctggtttcagacgtctgataatccagtctttaatgaattaacgagatatatgcgaattaaaaatacggttaacgattggaaatcattaacggatagcaaaacaaaattagaaagtgatagaggtaaacttctagccgctggtaaggatgatatattcgaattcaaatgtgtggatttcggcgcctattttatagctatgcgattggataagaaaacatatctgccgcaagctattaggcgaggtactggagacgcgtggatggttaaaaaggcggcaaaggtcgatccatctgctcaacaattttgtcagtatttgataaaacacaagtctaataatgttattacttgtggtaatgagatgttaaatgaattaggttatagcggttattttatgtcaccgcattggtgttccgattttagtaatatggaatagtgttagataaatgcggtaacaaatgttcctgtaaggaaccataacagcttagatttaacgttaaagatgagcataaacataataaacaaaattacaatcaaacctataacattaatatcaaacaatccaaaaaatgaaatcagtggagtagtaaacgcgtacataactcctggataacgtttagcagctgccgttcctattctagaccaaaaattcggtttcatgttttcgaagcggtgttctgcaacaagtcggggatcgtgttctacatatttggcggcattatccagtatctgcctattgatcttcatttcgttttcgattctggctatttcaaaataaaatcccgatgatagacctccagactttataatttcatctacgatgttcagcgccgtagtaactctaataatataggctgataagctaacatcataccctcctgtatatgtgaatatggtatgatttttgtccattacaagctcggttttaactttattgcctgtaataatttctctcatctgtaggatatctatttttttgtcatgcattgccttcaagacgggacgaagaaacgtaatatcctcaataacgttatcgttttctacaataactacatattctacctttttattttctaactcggtaaaaaaattagaatcccatagggctaaatgtctagcgatatttcttttcgtttcctctgtacacatagtgttacaaaaccctgaaaagaagtgagtatacttgtcatcatttctaatgtttcctccagtccactgtataaacgcataatccttgtaatgatctggatcatccttgactaccacaacatttcttttttctggcataacttcgttgtcctttacatcatcgaacttctgatcattaatatgctcatgaacattaggaaatgtttctgatggaggtctatcaataactggcacaacaataacaggagttttcaccgccgccatttagttattgaaattaatcatatacaactctttaatacgagttatattttcgtctatccattgtttcacatttacatatttcgacaaaaagatataaaatgcgtattccaatgcttctctgtttaatgaattactaaaatatacaaacacgtcactgtctggcaataaatgatatcttagaatattgtaacaatttattttgtattgcacatgttcgtgatctatgagttcttcttcgaatggcataggatctccgaatctgaaaacgtataaataggagttagaataataatatttgagagtattggtaatatataaactctttagcggtataattagtttttttctctcaatttctatttttagatgtgatggaaaaatgactaattttgtagcattagtatcatgaactctaatcaaaatcttaatatcttcgtcacacgttagctctttgaagtttttaagagatgcatcagttggttctacagatggagtaggtgcaacaattttttgttctacacatgtatgtactggagccattgttttaactataatggtgcttgtatcgaaaaactttaatgcagatagcggaagctcttcgccgcgactttctacatcgtaattgggttctaacgccgatctctgaatggatactagttttctaagttctaatgtgattctctgaaaatgtaaatccaattcctccggcattatagatgtgtatacatcggtaaataaaactatagtatccaacgatcccttctcgcaaattctagtcttaaccaaaaaatcgtatataaccacggagatggcgtatttaagagtggattcttctaccgttttgttcttggatgtcatataggaaactataaagtccgcactactgttaagaatgattactaacgcaactatatagttcaaattaagcattttggaaacataaaataactctgtagacgatacttgactttcgaataagtttgcagacaaacgaagaaagaacagacctctcttaatttcagaagaaaactttttttcgtattcctgacgtctagagtttatatcaataagaaagttaagaattagtcggttaatgttgtatttcattacccaagtttgagatttcataatattatcaaaagacatgataatattaaagataaagcgctgactatgaacgaaatagctatatggttcgctcaaaaatatagtcttgttaaacgtggaaacgataactgtatttttaatcacgtcagcggcatctaaattaaatataggtatatttattccacacactctacaatatgccacaccatcttcataataaataaattcgttagcaaaattattaattttagtgaaatagttagcgtcaactttcatagcttccttcaatctaatttgatgctcacacggtgcgaattctactctaacatcccttttccatgcctcaggttcatcgatctctataatatctagttttttgcgtttcacaaacacaggctcgtctctcgcgatgagatctgtatagtaactatgtaaatgataactagatagaaagatgtagctatatagatgacgatcctttaagagaggtataataactttaccccaatcagatagactgttgttatggtcttcggaaaaagaatttttataaatttttccagtattttccaaatatacgtacttaacatctaaaaaatccttaatgataataggaatggataatccgtctattttataaagaaatacatatcgcacattatacttttttttggaaatgggaataccgatgtgtctacataaatatgcaaagtctaaatattttttagagaatcttagttggtccaaattcttttccaagtacggtaatagatttttcatattgaacggtatcttcttaatctctggttctagttccgcattaaatgatgaaactaagtcactatttttataactaacgattacatcacctctaacatcatcatttaccagaatactgatcttcttttgtcgtaaatacatgtctaatgtgttaaaaaaaagatcatacaagttatacgtcatttcatctgtggtattcttgtcattgaaggataaactcgtactaatctcttctttaacagcctgttcaaatttatatcctatatacgaaaaaatagcaaccagtgtttgatcatccgcgtcaatattctgttctatcgtagtgtataacaatcgtatatcttcttctgtgatagtcgatacgttataaaggttgataacgaaaatatttttatttcgtgaaataaagtcatcgtaggattttggacttatattcgcgtctagtagatatgcttttatttttggaatgatctcaattagaatagtctctttagagtccatttaaagttacaaacaactaggaaattggtttatgatgtataatttttttagtttttatagattctttattctatacttaaaaaatgaaaataaatacaaaggttcttgagggttgtgttaaattgaaagcgagaaataatcataaattatttcattatcgcgatatccgttaagtttgtatcgtaatggcgtggtcaattacaaataaagcggatactagtagcttcacaaagatggctgaaatcagagctcatctaaaaaatagcgctgaaaataaagataaaaacgaggatattttcccggaagatgtaataattccatctactaagcccaaaaccaaacgagccactactcctcgtaaaccagcggctactaaaagatcaaccaaaaaggaggaagtggaagaagaagtagttatagaggaatatcatcaaacaactgaaaaaaattctccatctcctggagtcggcgacattgtagaaagcgtggctgctgtagagctcgatgatagcgacggggatgatgaacctatggtacaagttgaagctggtaaagtaaatcatagtgctagaagcgatctttctgacctaaaggtggctaccgacaatatcgttaaagatcttaagaaaattattactagaatctctgcagtatcgacggttctagaggatgttcaagcagctggtatctctagacaatttacttctatgactaaagctattacaacactatctgatctagtcaccgagggaaaatctaaagttgttcgtaaaaaagttaaaacttgtaagaagtaaatgcgtgcacttttttataaagatggtaaactctttaccgataataattttttaaatcctgtatcagacgataatccagcgtatgaggttttgcaacatgttaaaattcctactcatttaacagatgtagtagtatatgaacaaacgtgggaagaggcattaactagattaatttttgtgggaagcgattcaaaaggacgtagacaatacttttacggaaaaatgcatgtacagaatcgcaacgctaaaagagatcgtatttttgttagagtatataacgttatgaaacgaattaattgttttataaacaaaaatataaagaaatcgtccacagattccaattatcagttggcggtttttatgttaatggaaactatgttttttattagatttggtaaaatgaaatatcttaaggagaatgaaacagtagggttattaacactaaaaaataaacacatagaaataagtcccgatgaaatagttatcaagtttgtaggaaaggacaaagtttcacatgaatttgttgttcataagtctaatagactatataaaccgctattgaaactgacggatgattctagtcccgaagaatttctgttcaacaaactaagtgaacgaaaggtatacgaatgtatcaaacagtttggtattagaatcaaggatctccgaacgtatggagtcaattatacgtttttatataatttttggacaaatgtaaagtccatatctcctcttccgtcaccaaaaaagttaatagcgttaactatcaaacaaactgctgaagtggtaggtcatactccatcaatttcaaaaagagcttacatggcaacgactattttagaaatggtaaaggataaaaattttttagatgtagtatctaaaactacgttcgatgaattcctatctatagtcgtagatcacgttaaatcatctacggatggatgatatagatctttacacaaataattacaagaccgataaatggaaatggataagcgtataaaatctctcgcaatgacagctttcttcggagagctaaacacattagatattatggcattgataatgtctatatttaaacgccatccaaacaataccattttttcagtggataaggatggtcagtttatgattgatttcgaatacgataattataaggcttctcaatatttggatctgaccctcactccgatatctggagatgaatgcaagactcacgcatcgagtatagccgaacaattggcgtgtgcggatattattaaagaggatattagcgaatatatcaaaactactccccgtcttaaacgatttataaaaaaataccgcaatagatcagatactcgcatcagtcgagatacagaaaagcttaaaatagctctagctaaaggcatagattacgaatatataaaagacgcttgttaataagtaaatgaaaaaaaactagtcgtttataataaaacacgatatggatgccaacgtagtatcatcttctactattgcaacgtatatagacgctttagcgaagaatgcttcagaattagaacagaggtctaccgcatacgaaataaataatgaattggaactagtatttattaagccgccattaattactttgacaaatgtagtgaatatctctacgattcaggaatcgtttattcgatttaccgttactaataaggaaggtgttaaaattagaactaagattccattatctaaggtacatggtctagatgtaaaaaatgtacagttagtagatgctatagataacatagtttgggaaaagaaatcattagtgacggaaaatcgtcttcacaaagaatgcttgttgagactatcgacagaggaacgtcatatatttttggattacaagaaatatggatcctctatccgactagaattagtcaatcttattcaagcaaaaacaaaaaactttacgatagactttaagctaaaatattttctaggatccggtgcccagtctaaaagttctttattacacgctattaatcatccaaagtcaaggcctaatacatctctggaaatagaattcacacctagagacaatgaaaaagttccatatgatgaactaataaaggaattgacgactctatcacgtcatatatttatggcttctccagagaatgtaattctttctccgcctattaacgcacctataaagacttttatgttgcctaaacaagatatagtaggtctggatctggaaaatctatacgctgtaactaagactgacggcattcctataactatcagagttacatcaaacgggttgtattgttattttacacatcttggttatattattagatatcctgttaagagaataatagattccgaagtagtagtctttggtgaggcagttaaggataagaactggaccgtatatctcattaagctaatagagcctgtgaatgcaatcaatgatagactagaagaaagtaagtatgttgaatctaaactagtggatatttgtgatcggatagtattcaagtcaaagaaatacgaaggtccgtttactacaactagtgaagtcgtcgatatgttatctacatatttaccaaagcaaccagaaggtgttattctgttctattcaaagggacctaaatctaacattgattttaaaattaaaaaggaaaatactatagaccaaactgcaaatgtagtatttaggtacatgtccagtgaaccaattatctttggagaatcgtctatctttgtagagtataagaaatttagcaacgataaaggctttcctaaagaatatggttctggtaagattgtgttatataacggcgttaattatctaaataatatctattgtttggaatatattaatacacataatgaagtgggtattaagtccgtggttgtacctattaagtttatagcagaattcttagttaatggagaaatacttaaacctagaatcgataaaaccatgaaatatattaactcagaagattattatggaaatcaacataatatcatagtcgaacatttaagagatcaaagcatcaaaataggagatatctttaacgaggataaactatcggatgtgggacatcaatacgccaataatgataaatttagattaaatccagaagttagttattttacgaataaacgaactagaggaccgttgggaattttatcaaactacgtcaagactcttcttatttctatgtattgttccaaaacatttttagacgattccaacaaacgaaaggtattggcgattgattttggaaacggtgctgacctggaaaaatacttttatggagagattgcgttattggtagcgacggatccggatgctgatgctatagctagaggaaatgaaagatacaacaaattaaactctggaattaaaaccaagtactacaaatttgactacattcaggaaactattcgatccgatacatttgtctctagtgtcagagaagtattctattttggaaagtttaatatcatcgactggcagtttgctatccattattcttttcatccgagacattatgctaccgtcatgaataacttatccgaactaactgcttctggaggcaaggtattaatcactaccatggacggagacaaattatcaaaattaacagataaaaagacttttataattcataagaatttacctagtagcgaaaactatatgtctgtagaaaaaatagctgatgatagaatagtggtatataatccatcaacaatgtctactccaatgactgaatacattatcaaaaagaacgatatagtcagagtgtttaacgaatacggatttgttcttgtagataacgttgatttcgctacaattatagaacgaagtaaaaagtttattaatggcgcatctacaatggaagatagaccgtctacaaaaaactttttcgaactaaatagaggagccattaaatgtgaaggtttagatgtcgaagacttacttagttactatgttgtttatgtcttttctaagcggtaaataataatatggtatgggttctgatatccccgttctaaatgcattaaataattccaatagagcgatttttgttcctataggaccttccaactgtggatactctgtattgttaatagatatattaatacttttgtcgggtaacagaggttctacgtcttctaaaaataaaagtttgataacatctggcctgttcataaataaaaacttggcgattctatatatactcttattatcaaatctagccattgtcttatagatgtgagctactgtaggtgtaccatttgattttctttctaatactatatatttctctcgaagaagttcttgcacatcatctgggaataaaatactactgttgagtaaatcagttattttttttatatcgatattgatggacatttttatagttaaggataataagtatcccaaagtcgataacgacgataacgaagtatttatacttttaggaaatcacaatgactttatcagattaaaattaacaaaattaaaggagcatgtatttttttctgaatatattgtgactccagatacatatggatctttatgcgtcgaattaaatgggtctagttttcagcacggtggtagatatatagaggtggaggaatttatagatgctggaagacaagttagatggtgttctacatccaatcatatatctgaagatatacccgaagatatacacactgataaatttgtcatttatgatatatacacttttgacgctttcaagaataaacgattggtattcgtacaggtacctccgtcgttaggagatgatagtcatttgactaatccgttattgtctccgtattatcgtaattcagtagccagacaaatggtcaatgatatgatttttaatcaagattcatttttaaaatatttattagaacatctgattagaagccactatagagtttctaaacatataacaatagttagatacaaggataccgaagaattaaatctaacgagaatatgttataatagagataagtttaaggcgtttgtattcgcttggtttaacggcgtttcggaaaatgaaaaggtactagatacgtataaaaaggtatctaatttgatataatgaattcagtgactgtatcacacgcgccatatactattacttatcacgatgattgggaaccagttatgagtcaattggtagagttttataacgaagtagccagttggctgctacgagacgagacgtcgcctattcctgataagttctttatacagttgaaacaaccgcttagaaataaacgagtatgtgtgtgtggtatagatccgtatccgaaagatggaactggtgtaccgttcgaatcaccaaattttacaaaaaaatcaattaaggagatagcttcatctatatctagattaaccggagtaattgattataaaggttataaccttaatataatagacggggttataccctggaattattacttaagttgtaaattaggagaaacaaaaagtcacgcgatctactgggataagatttccaagttactgctgcagcatataactaaacacgttagtgttctttattgtttgggtaaaacagatttctcgaatatacgggcaaagttagaatccccggtaactaccatagtgggatatcatccagcggctagagaccgccaattcgagaaagatagatcatttgaaattatcaacgttttactggaattagacaacaaggtacctataaattgggctcaagggtttatttattaatgctttagtgaaattttaacttgtgttctaaatggatgcggctattagaggtaatgatgttatctttgtccttaagactataggtgtcccatcagcatgtagacaaaatgaagatccaagattcgtagaagcatttaaatgcgacgagttaaaaagatatattgataataatccagaatgtacactattcgaaagtcttagggatgaggaagcatactctatagtcagaattttcatggatgtagatttagacgcgtgtctagacgaaatagattatttaacggctattcaagattttattatcgaggtgtcaaactgtgtagctagattcgcgtttacagaatgcggtgccattcatgaaaatgtaataaaatccatgagatctaatttttcattgactaagtctacaaatagagataaaacaagttttcatattatctttttagacacgtataccactatggatacattgatagctatgaaacgaacactattagaattaagtagatcatctgaaaatccactaacaagatcgatagacactgccgtatataggagaaaaacaactcttcgggttgtaggtactaggaaaaatccaaattgcgacactattcatgtaatgcaaccaccgcatgataatatagaagattacctattcacttacgtggatatgaacaacaatagttattacttttctctacaacgacgattggaggatttagttcctgataagttatgggaaccagggtttatttcattcgaagacgctataaaaagagtttcaaaaatattcattaattctataataaactttaatgatctcgatgaaaataattttacaacggtaccactggtcatagattacgtaacaccttgtgcattatgtaaaaaacgatcgcataaacatccgcatcaactatcgttggaaaatggtgctattagaatttacaaaactggtaatccacatagttgtaaagttaaaattgttccgttggatggtaataaactgtttaatattgcacaaagaattttagacactaactctgttttattaaccgaacgaggagactatatagtttggattaataattcatggaaatttaacagcgaagaacccttgataacaaaactaattctgtcaataagacatcaactacctaaggaatattcaagcgaattactctgtccgaggaaacgaaagactgtagaagctaacatacgagacatgttagtagattcagtagagaccgatacctatccggataaacttccgtttaaaaatggtgtattggacctggtagacggaatgttttactctggagatgatgctaaaaaatatacgtgtactgtatcaaccggatttaaatttgacgatacaaagttcgtcgaagacagtccagaaatggaagagttaatgaatatcattaacgatatccaaccattaacggatgaaaataagaaaaatagagagctatatgaaaaaacattatctagttgtttatgtggtgctaccaaaggatgtttaacattcttttttggagaaactgcaactggaaagtcgacaaccaaacgtttgttaaagtctgctatcggtgacctgtttgttgagacgggtcaaacaattttaacagatgtattggataaaggacctaatccatttatcgctaacatgcatttgaaaagatctgtattctgtagcgaactacctgattttgcctgtagtggatcaaagaaaattagatctgataatattaaaaagttgacagaaccttgtgtcattggaagaccgtgtttctccaataaaattaataatagaaaccatgctacaatcattatcgatactaattacaaacctgtctttgataggatagataacgcattaatgagaagaattgccgtcgtgcgattcagaacacacttttctcaaccttctggtagagaggctgctgaaaataatgacgcgtacgataaagtcaaactattagacgaggggttagatggtaaaatacaaaataatagatatagatttgcatttctatacttgttggtgaaatggtacaaaaaatatcatgttcctattatgaaactatatcctacacccgaagagattcctgactttgcattctatctcaaaataggtactctgttagtatctagctctgtaaagcatattccattaatgacggacctctccaaaaagggatatatattgtacgataatgtggttactcttccgttgactactttccaacagaaaatatccaagtattttaattctagactatttggacacgatatagagagcttcatcaatagacataagaaatttgccaatgttagtgatgaatatctgcaatatatattcatagaggatatttcatctccgtaaatatatgctcatatatttatagaagatatcacatatctaaatgaataccggaattatagatttatttgataatcatgttgatagtataccaactatattacctcatcagttagctactctagattatctagttagaactatcatagatgagaacagaagcgtgttattgttccatattatgggatcaggtaaaacaataatcgctttgttgttcgccttggtagcttccagatttaaaaaggtttacattctagtgccgaacatcaacatcttaaaaattttcaattataatatgggtgtagctatgaacttgtttaatgacgaattcatagctgagaatatctttattcattccacaacaagtttttattctcttaattataacgataacgtcattaattataacggattatctcgctacaataactctatttttatcgttgatgaggcacataatatctttgggaataatactggagaacttatgaccgtgataaaaaataaaaacaagattccttttctactattgtctggatctcccattactaacacacctaatactctgggtcatattatagatttaatgtccgaagagacgatagattttggtgaaattattagtcgtggtaagaaagtaattcagacacttcttaacgaacgaggtgtgaatgtacttaaggatttgcttaaaggaagaatatcatattacgaaatgcctgataaagatctaccaacgataagatatcacggacgtaagtttctagatactagagtagtatattgtcacatgtctaaacttcaagagagagattatatgattactagacgacagctatgttatcatgaaatgtttgataaaaatatgtataacgtgtcaacggcagtattgggacaacttaatctgatgaataatttagatactttatttcaggaacaggataaggaattgtacccaaatctgaaaataaataatggcgtgttatacggagaagaattggtaacgttaaacattagttccaaatttaagtactttatcaatcggatacagacactcaacggaaaacattttatatacttttctaattctacatatggtggattggtaattaaatatatcatgctcagtaatggatattctgaatataatggttctcagggaactaatccacatatgataaacggcaaaccaaaaacatttgctatcgttactagtaaaatgaaatcgtctttagaggatctattagatgtgtataattctcctgaaaacgatgatggtagtcaattgatgtttttgttttcatcaaacattatgtccgaatcctatactctgaaagaggtaaggcatatttggtttatgactatcccagatactttttctcaatacaaccaaattcttggacgatctattagaaaattctcttacgccgatatttctgaaccagttaatgtatatcttttagccgccgtatattccgatttcaatgacgaagtaacgtcattaaacgattacacacaggatgaattaattaatgttttaccatttgacatcaaaaagctgttgtatctaaaatttaagacgaaagaaacgaatagaatatactctattcttcaagagatgtctgaaacgtattctcttccaccacatccatcaattgtaaaagttttattgggagaattggtcagacaatttttttataataattctcgtattaagtataacgactccaagttacttaaaatggttacatcagttataaaaaataaagaagacgctaggaattacatagatgatattgtaaacggtcacttctttgtatcgaataaagtatttgataaatctcttttatacaaatacgaaaacgatattattacagtaccgtttagactttcctacgaaccatttgtttggggagttaactttcgtaaagaatataacgtggtatcttctccataaaactgatgagatatataaagaaataaatgtcgagctttgttaccaatggatacctttccgttacattggaacctcatgagctgacgttagacataaaaactaatattaggaatgccgtatataagacgtatctccatagagaaattagtggtaaaatggccaagaaaatagaaattcgtgaagacgtggaattacctctcggcgaaatagttaataattctgtagttataaacgttccgtgtgtaataacctacgcgtattatcacgttggggatatagtcagaggaacattaaacatcgaagatgaatcaaatgtaactattcaatgtggagatttaatctgtaaactaagtagagattcgggtactgtatcatttagcgattcaaagtactgcttttttcgaaatggtaatgcgtatgacaatggcagcgaagtcactgccgttctaatggaggctcaacaaggtatcgaatctagttttgtttttctcgcgaatatcgtcgactcataagaaagagaatagcggtaagtataaacacgaatactatggcaataattgcgaatgttttattcccttcgatatatttttgataatatgaaaaacatgtctctctcaaatcggacaaccatctcataaaatagttctcgcgcgctggagaggtagttgctgctcgtataatctccccagaataatatacttgcgtgtcgtcgttcaatttatacggatttctatagttctctgttatataatacggttttccatcatgattagacgacgacaatagtgttctaaatttagatagttgatcagaatgaatgtttattggcgttggaaaaattatccatacagcgtctgcagagtgcttgatagttgttcctagatatgtaaaataatccaacgtactaggtagcaaattgtctagataaaatactgaatcaaacggcgcagacgtattagcggatctaatggaatccaattgattgactatcttttgaaaatatacatttttatgatccgatacttgtaagaatatagaaataatgataagtccatcatcgtgtttttttgcctcttcataagaactatattttttcttattccaatgaacaagattaatctctccagagtatttgtacacatctatcaagtgattggatccataatcgtcttcctttccccaatatatatgtagtgatgataacacatattcattggggagaaaccctccacttatatatcctcctttaaaattaatccttactagttttccagtgttctggatagtggttggtttcgactcattataatgtatgtctaacggcttcaatcgcgcgttagaaattgcttttttagtttctatattaataggagatagttgttgcggcatagtaaaaatgaaatgataactgtttaaaaatagctcttagtatgggaattacaatggatgaggaagtgatatttgaaactcctagagaattaatatctattaaacgaataaaagatattccaagatcaaaagacacgcatgtgtttgctgcgtgtataacaagtgacggatatccgttaataggagctagaagaacttcattcgcgttccaggcgatattatctcaacaaaattcagattctatctttagagtatccactaaactattacggtttatgtactacaatgaactaagagaaatctttagacggttgagaaaaggttctatcaacaatatcgatcctcacttcgaagagttaatattattgggtggtaaactagataaaaaggaatctattaaagattgtttaagaagagaattaaaagaggaaagtgatgaacgtataacagtaaaagaatttggaaatgtaattctaaaacttacaacacgggataaattatttaataaagtatatataagttattgcatggcgtgttttattaatcaatcgttggaggatttatcgcatactagtatttacaatgtagaaattagaaagattaaatcattaaatgattgtattaacgacgataaatacgaatatctgtcttatatttataatatgctagttaatagtaaatgaacttttacagatctagtataattagtcagattattaagtataatagacgactagctaagtctattatttgcgaggatgactctcaaattattacactcacggcattcgttaaccaatgcctatggtgtcataaacgagtatccgtgtccgctattttattaactactgataacaaaatattagtatgtaacagacgagatagttttctctattctgaaataattagaactagaaacatgtttagaaagaaacgattatttctgaattattccaattatttgtccaaacaggaaagaagtatactatcgtcatttttttctctatatccagctactgctgataatgatagaatagatgctatttatccgggtggcatacccaaaaggggtgagaatgttccagagtgtttatccagggaaattaaagaagaagttaatatagacaattcttttgtattcatagacactcggttttttattcatggcatcatagaagataccattattaataaattttttgaggtaatcttctttgtcggaagaatatctctaacgagtgatcaaatcattgatacatttaaaagtaatcatgaaatcaaggatctaatatttttagatccgaattcaggtaatggactccaatacgaaattgcaaaatatgctctagatactgcaaaactcaaatgttatggccatagaggatgttattacgaatcattaaaaaaattaactgaggatgattgattagaaaatataaattaatttaccatcgtgtatttttataacgggattgtccggcatatcatgtagatagttaccgtctacatcgtatactcgaccatctacgcctttaaatcctctatttattgacattaatctattagaattggaataccaaatattagtaccctcaattagtttattggtaatattttttttagacgatagatcgatggctcttgaaaccaaggttttccaaccggactcattgtcgatcggtgagaagtctttttcattagcatgaatccattctaatgatgtatgtttaaacactctaaacaattggacaaattcttttgatttgctttgaatgatttcaaataggtcttcgtctacagtaggcataccattagataatctagccattataaagtgcacgtttacatatctacgttctggaggagtaagaacgtgactattgagacgaatggctcttcctactatctgacgaagagacgcctcgttccaagtcatatctagaatgaagatatcattgattgagaagaagctaataccctcgcctccactagaagagaatacgcatgttttaatgcattctccgttagtgtttgattcttggttaaactcagccaccgccttgattctagtatcttttgttctagatgagaactctatattagagataccaaagactttgaaatatagtaataagatttctattcctgactgattaacaaatggttcaaagactagacatttaccatgggatgctaatattcccaaacatacatctataaatttgacgcttttctcttttaattcagtaaatagagagatatcagccgcactagcatcccctttcaatagttctccctttttaaaggtatctaatgcggatttagaaaactctctatttcttaatgaatttttaaaatcattatatagtgttgctatctcttgcgcgtattcgcccggatcacgattttgtctttcaggaaagctatcgaacgtaaacgtagtagccatacgtctcagaattctaaatgatgatatacctgtttttatttcagcgagtttagccttttgataaatttcttcttgctttttcgacatattaacgtatcgcattaatactgttttcttagcgaatgatgcagacccttctacgtcatcaaaaatagaaaactcgttattaactatgtacgaacataggcctcctagtttggagactaattctttctcatcaactagacgtttattctcaaatagcgattggtgttgtaaggatcctggtcgtagtaagttaaccaacatggtgaattcttgcacactattgacgataggtgtagccgataaacaaatcatcttatggttttttaacgcaatggttttagataaaaaattatatactgaacgagtaggacggatcttaccatcttctttgattaatgatttagaaatgaagttatgacattcatcaataatgacgcatattctactcttggaattaatagttttgatattagtaaaaaatttatttctaaaattttgatcatcgtaattaataaaaatacaatccttcgttatctctggagcgtatctgagtatagtgttcatccaaggatcttctatcaaagcctttttcaccaataagataatagcccaattcgtataaatatccttaagatgtttgagaatatatacagtagtcattgttttaccgacacccgtttcatggaacaataaaagagaatgcatactgtctaatcctaagaaaactcttgctacaaaatgttgataatccttgaggcgtactacgtccgaccccatcatttcaacaggcatattagtagttctgcgcaatgcataatcgatataggccgcgtgtgatttactcatttatgagtgataagtaataactatgttttaaaaatcacagcagtagtttaactagtcttctctgatgtttgttttcgatacttttcgaatcagaagtcatactagaataaagcagcgagtgaacgtaatagagagcttcgtatactctattcgaaaactctaagaacttattaatgaattccgtatccactggatcgtttaaaatactaaattgaacactgttcacatccttccaagaagaagacttagtgacggacttaacatgagacataaataaatccaaattttttttacaaacatcactagccaccataatggcgctatctttcaaccagctatcgcttacgcattttagcagtctaacatttttaaagagactacaatatattctcatagtatcgattacacctctaccgaataaagttggaagtttaataatacaatatttttcgtttacaaaatcaaataatggtcgaaacacgtcgaaggttaacatcttataatcgctaatgtatagattgttttcagtgagatgattattagatttaatagcatctcgttcacgtttgaacagtttattgcgtgcgctgaggtcggcaactacggcgtccgctttagtactcctcccataatactttacgctattaatctttaaaatttcatagactttatctagatcgctttctggtaacatgatatcatgtgtaaaaagttttaacatgtcggtcggcattctatttagatcattaactctagaaatctgaagaaagtaattagctccgtattccagactaggtaatgggcttttacctagagacagattaagttctggcaatgtttcataaaatggaagaaggacatgcgttccctcccggatattttttacaatttcatccatttacaactctatagtttgttttcattattattagttattatctcccataatcttggtaatacttaccccttgatcgtaagataccttatacaggtcattacatacaactaccaattgtttttgtacataatagattggatggttgacatccatggtggaataaactactcgaacagatagtttatctttccccctagatacattggccgtaatagttgtcggcctaaagaatatctttggtgtaaagttaaaagttagggttcttgttccattattgctttttgtcagtagttcattataaattctcgagatgggtccgttctctgaatatagaacatcatttccaaatctaacttctagtctagaaataatatcggtcttattcttaaaatctattcccttgatgaagggatcgttaatgaacaaatccttggcctttgattcggctgatctattatctccgttatagacgttacgttgactagtccaaagacttacaggaatagatgtatcgatgatgttgatactatgtgatatgtgagcaaagattgttctcttagtggcatcactatatgttccagtaatggcggaaaactttttagaaatgttatatataaaagaattttttcgtgttccaaacattagcagattagtatgaagataaacactcatattatcaggaacattatcaatttttacatacacatcagcatcttgaatagaaacgataccatcttctggaacctctacgatctcggcagactccggataaccagtcggtgggccatcactaacaataactagatcatccaacaatctactcacatatgcatctatataatctttttcatcttgtgagtaccctggatacgaaataaatttattatccgtatttccataataaggtttagtataaacagagagcgatgttgccgcatgaacttcagttacagtcgccgttggttggtttatttgacctattactctcctaggtttctctataaacgatggtttaatttgtacattcttaaccatatatccaataaagctcaattcaggaacataaacaaattctttgttgaacgtttcaaagtcgaacgaagagtcacgaataacgatatcggatactggattgaaggttaccgttacggtaatttttgaatcggatagtttaagactgctgaatgtatcttccacatcaaacggagttttaatataaacgtatactgtagatggttctttaatagtgtcattaggagttaggccaatagaaatatcattaagttcactagaatatccagagtgtttcaaagcaattgtattattgatacaattattatataattcttcgccctcaatttcccaaataacaccgttacacgaagagatagatacgtgattaatacatttatatccaacatatggtacgtaaccgaatcttcccatacctttaacttctggaagttccaaactcagaaccaaatgattaagcgcagtaatatactgatccctaatttcgaagctagcgatagcctgattgtctggaccatcgtttgtcataactccggatagagaaatatattgcggcatatataaagttggaatttgactatcgactgcgaagacattagaccgtttaatagagtcatccccaccgatcaaagaattaatgatagtattattcattttctatttaaaatggaaaaagcttacaataaactccgtagagaaatatctataatttgtgagttttccttaaagtaacagcttccgtaaacgccgtctttatctcttagtaagtttattgtatttataaccttttccttatcttcatagaatactaaaggcaacaaagaaatttttggttcttctctaagagctacgtgagacttaaccatagaagccaacgaatccctacatattttagaacagaaataccctacttcaccacccttgtatgtctcaatactaataggtctaaaaaccaaatcttgattacaaaaccaacacttatcaattacactatttgtcttaatagacacatctgccatagatttataatactttggtagtatacaagcgagtgcttcttctttagcgggcttaaagactgctttaggtgctgaaataaccacatctggaaggcttactcgcttagccatttaattacggaactatttttttatacttctaatgagcaagtagaaaacctctcatctacaaaaacgtactcgtgtccataatcctctaccatagtaacacgttttttagatctcatatgtgctaaaaagttttcccatactaattggttactattatttttcgtataatttttaacagtttgaggttttagatttttagttacagaagtgatatcgaatattttatccaaaaagaatgagtaattaattgtcttagaaggagtgttttcttggcaaaagaataccaagtgcttaaatatttctactacttcattaatcttttctgtactcagattcagtttctcatcttttacttgattgattatttcaaagactaacttataatcctttttatttattctctcgttagccttaagaaaactagatacaaaatttgcatctacatcatccgtggatatttgatttttttccatgatatccaagagttccgagataatttctccagaacattgatgagacaataatctccgcaatacatttctcaaatgaataagtttattagacacgtggaagtttgactttttttgtacctttgtacatttttgaaataccgactcgcaaaaaatacaatattcatatccttgttcagatactataccgttgtgtctacaaccgctacataatcgtagattcatgttaacactctacgtatctcgtcgtccaatattttatataaaaacattttatttctagacgttgccagaaaatcctgtaatatttttagttttttgggctgtgaataaagtatcgccctaatatggttaccgtcctccgccaatatagtagttaaattatccgcacatgcagaagaacacgcttaggcggattcagtacaatgttatatttttcgtaccaactcatttaaatatcataatctaaaatagttctgtaatatgtctagcgctaatatattgatcataatcctgtgcataaattaagatacaacaatgtctcgaaatcatcgacatggcttcttccatagttagaagatcgtcgtcaaagttagcaacgtgattcatcaacatttgctgttttgaggcagcaaatactgaaccatcgccattcaaccattcataaaaaccatcgtctgaatccattgataatttcttgtactggtttttgagagctcgcatcaatctagcatttctagctcccggattgaaaacagaaagaggatcgtacatccagggtccattttctgtaaatagaatcgtataatgtcccttcaagaagatatcagacgatccacaatcaaagaattggtctccgagtttgtaacaaactgcggactttaacctatacatgataccgtttagcataatttctggtgatacgtcaatcggagtatcatctattagagatctaaagccggtgtaacattctccaccaaacatattcttattctgacgtcgttctacataaaacatcattgctccattaacgataacaggggaatgaacagcactacccatcacattagttcccaatggatcaatgtgtgtaactccagaacatcttccatatcctatgttaggaggagcgaacaccactcttccactattgccatcgaatgccatagaataaatatccttggaattgatagaaatcggactgtcggatgttgtgatcatcttcataggattaacaacgatgtatggtgccgcctgaagtttcatatcgtaactgatgccgtttataggtctagccacagaaaccaacgtaggtctaaatccaactatagacaaaatagaagccaatatctgttcctcatctgtcataacttgagagcatccagtatgaataatcttcattagatggggatctaccgcatcatcatcgttacaataaaaaattcccattctaatgttcataattgcttttctaatcatggtatgcatgtttgctctctgaatctctgtggaaattagatctgatacacctgtaatcactatcggattatcctccgtaagacgattaaccaacaacatataattataagactttacttttctaaattcataaagttgctggattaggctataggtgtctccatgtacatacgcgttctcgagcgcaggaagtttaataccgaatagtgccatcagaataggatgaatatagtaattagtttctggttttctataaataaaagacaaatcttgtgaactagacatatcggtaaaatgcatggattggaatcgtgtagtcgacagaagaatatgatgattagatggagagtatattttatctaactctttgagttggtcaccgattctaggactagctcgagaatgaataagtactaaaggatgagtacatttcacagaaacactagcattgttcaatgtgctctttacatgggtaaggagttgaaatagctcgtttctatttgttctgacaatatttagtttattcataatgttaagcatatcctgaatagtaaagttagatgtgtcatacttgttagtagttagatatttagcaattgcattcccatcatttctcaatctcgtactccaatcatgtgtagatgctacttcatctatagaaaccatacaatcctttttgataggctgttgagattgattatttcctgcacgtttaggtttggtacgttgatttctagcccctgcggatataaagtcatcgtctacaatttgggacaatgaattgcatacactacaagacaaagatttatcagaagtgtgaatatgatcttcatctaccaaagaaagagtttgattagtataactagattttagtcctgcgttagatgttaaaaaaacatcgctattgaccacggcttccattatttatattcgtagtttttactcgaaagcgtgattttaatatccaatcttattacttttggaatcgttcaaaacctttgactagttgtagaatttgatctattgccctacgcgtatactcccttgcatcatatacgttcgtcaccagatcgtttgtttcggcctgaagttggtgcatatctttttcaacactcgacatgagatccttaagggccatatcgtctagattttgttgagatgctgctcctggatttggattttgttgtgctgttgtacatactgtaccaccagtaggtgtaggagtacatacagtggccacaataggaggttgaggaggtgtaaccgttggagtagtacaagaaatatttccatccgattgttgtgtacatgtagttgttggtaacgtctgagaaggttgggtagatggcggcgtcgtcgttttttgatctttattaaatttagagataatatcctgaacagcattgctcggcgtcaacgctggaaggagtgaactcgccggcgcatcagtatcttcagacagccaatcaaaaagattagacatatcagatgatgtattagtttgttgtcgtggttttggtgtaggagcagtactactaggtagaagaataggagccggtgtagctgttggaaccggctgtggagttatatgaatagttggttgtagcggttggataggctgtctgctggcggccatcatattatctctagctagttgttctcgcaactgtctttgataatacgactcttgagactttagtcctatttcaatcgcttcatcctttttcgtatccggatccttttcttcagaataatagattgacgactttggtgtagaggattctgccagcccctgtgagaacttgttaaagaagtccatttaaggctttaaaattgaattgcgattataagattaaatggcagacacagacgatattatcgactatgaatccgatgatctcactgaatacgaggatgatgaagaagaggaagaagatggagagtcactagaaactagtgatatagatcccaaatcttcttataagattgtagaatcagcatccactcatatagaagatgcgcattccaatcttaaacatatagggaatcatatatctgctcttaaacgacgctatactagacgtataagtctatttgaaatagcgggtataatagcagaaagctataacttgcttcaacgaggaagattacctctagtttcagaattttctgacgaaacgatgaagcaaaatatgctacatgtaattatacaagagatagaggagggttcttgtcctatagtcatcgaaaagaacggagaattgttgtcggtaaacgattttgacaaagatggtctaaaattccatctagactatattatcaaaatttggaaacttcaaaaacgatattagaatttatacgaatatcgttctctaaatgtcacaatcaagtctcgcatgttcagcaatttattgtcgtactttatatcgtgttcattaacgatatcttgcaaaatagtaatgattctatcttccttcgatagatattcttcagagattattgtcttatattctttcttgttatcagatatgaatttgataagactttgaacattattgatacccgtctgtttaattttttctacagatattttagttttggcagattctatcgtatctgtcaatagacatccaacatcgacattcgacgtcaattgtctataaatcaacgtataaattttagaaataacattagcgaattgttgtgcattgatgtcgttattctgaaacagtatgattttaggtagcattttcttaacaaagagaacgtatttattgttactcagttgaacagatgatatatccagattactaacgcatctgattccgtataccaaactttcagaagaaatggtatacaattgtttgtattcattcaatgtctctttttcagaaattagtttagagtcgaatactgcaataattttcaagagatagttttcatcagataagattttatttagtgtagatatgataaaactattgttttgttggagaacttgatacgccgcgttctctgtagtcgacgctctcaaatgggaaacaatctccattatttttttggaatcggatacaatatcttcggtatcttgacgcagtctagtatacatagagttaagagagattagagtttgtacattaagcaacatgtctctaaatgtggctacaaacttttccttttccacatcatctagtttattatataccgatttcacaacggcaccagatttaaggaaccagaatgaaaaactctgataactacaatatttcatcatagttacgattttatcatcttctatagttggtgtgatagcgcatacctttttctccaagactggaaccaacgtcataaaaatgtttaaatcaaaatccatatcaacatctgatgcgctaagaccagtctcgcgttcaagattatctttactaatggtgacgaactcatcgtataaaactctaagtttgtccattatttatttacagatttagttgtttaatttatttgtgctcttccagagttgggatagtatttttctaacgtcggtattatattattaggatctacgttcatatgtatcataatattaatcatccacgttttgataaatctatctttagcttctgaaataacgtatttaaacaaaggagaaaaatatttagctacggcatcagacgcaataacattttttgtaaatgtaacatatttagacgacagatcttcgttaaaaagttttccatctatgtagaatccatcagttgttaacaccattcccgcgtcagattgaataggagtttgaatagtttgttttggaaatagatccttcaataacttatagttgggtgggaaaaaatcgattttatcactagactctttcttttttactatcattacctcatgaactatttcttgaatgagtatatgtattttctttcctatatcggacgcgttcattggaaaatataccatgtcgttaactataagaatatttttatcctcgtttacaaactgaataatatcagatgtagttcgtaaacgaactatatcatcaccagcacaacatctaactatatgatatccactagtttcctttagtcgtttattatcttgttccatattagcagtcattccatcatttaagaaggcgtcaaagataatagggagaaatgacattttggattctgttacaactttaccaaaattaaggatatacggacttactatctttttctcaacgtcaatttgatgaacacacgatgaaaatgtacttcgatgagattgatcatgtagaaaacaacaagggatacaatatttccgcatatcatgaaatatattaagaaatcccaccttattatatttccccaaaggatccatgcacgtaaacattatgccgttatcattaataaagacttctttctcatcggatctgtaaaagttgttactgatttttttcattccaggatctagataattaataatgatgggttttctattcttattctttgtattttggcatatcctagaccagtaaacagtttccactttggtaaaatcagcagacttttgaacgctattaaacatggcattaatggcaataactaaaaatgtaaaatatttttctatgttaggaatatggtttttcactttaatagatatatggtttttggccaaaatgatagatatttttttatccgaggatagtaaaatattattagtcgccgtctctataaaaatgaagctagtctcgatatccaattttattctagaattgataggagtcgccaaatgtaccttatacgttatatctcccttgatgcgttccatttgtgtatctatatcggacacaagatctgtaaatagttttacgttattaatcatcacggtatcgccgtcgctagataatgctaatgtaccatccaagtcccaaatggagagatttaactgttcatcgtttagaataaaatgattaccggtcatattaataaagtgttcatcgtatctagataacaacgacttataattaatgtccaagtcttgaactcgctgaatgatcttttttaacccagttagttttagattggtacgaaatatattgttaaactttgattctacagtaatgtccaaatctagttgtggaaatacttccatcaacattgtttcaaacttgataatattattatctacatcttcgtacgatccaaattccggaatagatgtatcgcacgctctgaccacccagataaccaaaaagtcacacgctccaggatatacattgtataaaaagctatcgttttttagtagtgtttttttctgagtatatacgaagggattaaaaatagtattatcaacgtaactatattccaaattattcttatgagaatagataataatatcgtccttaatatctaacaaatttcctaaatatccctttaattgagtcattcgaagcgtcaatagaatatgtctcttaactatttccggctgttgtatatttaaatgacttcgtaaaaaataatatatgggcgacttctcatctatgtaatcatatggagtgagatatagggctcgttctacctcctgccccttacccacctgtaataccaattgcggacttactatatatcgcatatttatatcgtggggtaaagtgaaaatctactaccgatgatgtaagtcttacaatgttcgaaccagtaccagatcttaatttggaggcctccgtagaactaggggaggtaaatatagatcaaacaacacctatgataaaggagaatagcggttttatatcccgcagtagacgtctattcgcccatagatctaaggatgatgagagaaaactagcactacgattctttttacaaagactttattttttagatcatagagagattcattatttgttcagatgcgttgacgctgtaaaagacgtcactattaccaaaaaaaataacattatcgtggcgccttatatagcacttttaactatcgcatcaaaaggatgcaaacttacagaaacaatgattgaagcattctttccagaactatataatgaacatagtaagaaatttaaattcaactctcaagtatccatcatccaagaaaaactcggataccagtttggaaactatcacgtttatgattttgaaccgtattactctacagtagctctggctattcgagatgaacattcatctggcatttttaatatccgtcaagagagttatctggtaagttcattatctgaaataacatatagattttatctaattaatctaaaatctgatcttgttcaatggagtgctagtacgggcgctgtaattaatcaaatggtaaatactgtattgattacagtgtatgaaaagttacaactggtcatagaaaatgattcacaatttacatgttcattggctgtggaatcagaacttccaataaaattacttaaagatagaaatgaattatttacaaaattcattaacgagttaaaaaagaccagttcattcaagataagcaaacgcgataaggatacgctattaaaatattttacttaggactggagttagaatttatagacgactcatttcgtttatcattattactaccatcattattagtattcttcttgtcatcttgttcagaaatatacagcaatgctatacctaatactaaatacattatcatgctcgcaatggctctaacaacaacgaaccaaaatgaatttggtcgtagcttttgttcacaaaaatacataaagaaatgtctacataaatctatggcgccattggctacttgaaatagcgccagtcctcctacagattttaatatagctgtataacatgacatttattcatcatcaaaagagacagagtcaccatctgtcatatttagattttttttcatgtgttcaaagtatcctctactcatttcattataatagtttatcatacttagaattttaggacggatcaatgagtaagacttgactagatcgtcagtagtaatttgtgcatcgtctattctgcatccgcttcgtcgaataatgtatagcatcgctttgagattctccatagctatcaagtctttatacaatgacatggaaatatctgtgaatactttatacttctccaacatcgatgccttaacatcatcgcctactttagcattgaaaatacgttctattgtgtagatggatgtagcaagatttttaaacaacaatgccattttacacgatgattgcctcaagtctccaatcgtttgtttagaacgattagctacagagttcaacgcttggctgactagcatattattatctttagaaattgtattcttcaatgaggcgtttatcatatctgtgatttcgttagtcatattacagtctgactgggttgtaatgttatccaacatatcacctatggatacggtacacgtaccagcatttgtaataatcctatctaagatgttgtatggcattgcgcagaaaatatcttctcctgtaatatctccactctcgataaatctactcagattattcttaaatgccttattctctggagaaaagatatcagtgtccatcatttcattaatagtatacgcagaaaagataccacgagtatcaattctatccaagatacttatcggttccgagtcacagataatggtttcctctccttcgggagatcctgcatagaaatatctaggacaatagtttctatactgtctgtaactctgataatctctaaagtcactaactgataccatgaaattgagaagatcaaacgctgaagtaattaatttttctgcctcgtttttactacaactagttttcatcaatgtagtgacgatgtattgtttagttactcttggtctaatactgatgatagagatattattacttcccataatggatcttctagtagtcaccttaaagcccattgatgcaaatagcagatagataaagtcttggtatgactcctttctaatatagtacggactacctttgtcacccaactttatacccacataagccataacaacctctttaatagccgtttcatgaggtttatcagccatgagcctgagtagttggaagaatctcatgaatcccgtctcagaaagtcctatatgcatgatagatttatctttcctgggaaactctcgtatagtcatagatgaaatactcttcaaagtttctgaaataagattagtaacagtcttacctccgactactctaggtaacaaacaaactctaataggtgttttctctgcggagataatatcagaaaggatagagcaataagtagtattattgtgattataaagaccgaatacataacaggtagaatttataaacatcatgtcctgaaggtttttagacttgtattcctcgtaatccataccgtcccaaaacatggatttggtaactttgatagccgtagatctttgttccttcgccaacaggttaaagaaattaataaagaatttgttgtttctatttatgtccacaaattgcacgtttggaagcgccacggttacattcactgcagcattttgaggatcgcgagtatgaagtacgatgttattgtttactggtatatctggaaagaaatctaccagtctaggaataagagattgatatcgcatagaaatacaaaagttcataatctcatcatcgaagagcattttgttaccattgtaataaatatccactctgtcatatgtataaatgaagtactgttcaaacatgatgagatgtttatatgttggcatagtagtgagatcgacgtttggtaatggcaatgtattaagattaactccataatgtctagcagcatctgcgatgttataagtgttgtcaaagcggggtcgatcttgtgctgttatatattgtctaacacctataagattatcaaaatcttgtctgcttaatacaccgttaacaatttttgccttgaattcttttattggtgcattaataacatccttatagaggatgttaaacaaataagtattatcaaagttaagatctgggtatttcttttctgctagaacatccattgagtcggagccatctggtttaatataaccaccgataaatctagctctgtattctgtatccgtcaatctaatattaagaaggtgttgagtgaaaggtggaagatcgtaaaagctgtgagtattaatgataggattagtttccgaactaatgttaattggggtattaataatatctatatttccagcgttaagtgtaacattaaacagttttaattcacgtgacgtggtatcaattaaataattaatgcccaatttggatatagcagcctgaagctcatcttgtttagttacggatcctaatgagttattaagcaatatatcgaacggatgaacgaaggttgttttgagtttgtcgcatactttgtaatctagacatagatgcggaagaacggtagaaactatacgaaataaatattcagagtcctctaattgatcaagagtaactattgacttaataggcatcatttatttagtattaaatgacgaccgtaccagtgacggatatacaaaacgatttaattacagagttttcagaagataattatccatctaacaaaaattatgaaataactcttcgtcaaatgtctattctaactcacgttaacaacgtggtagatagagaacataatgccgccgtagtgtcatctccagaggaaatatcctcacaacttaatgaagatctatttccagatgatgattctccggccactattatcgaaagagtacaacctcatactactattattgacgatactccacctcctacgtttcgtagagagttattgatatcggaacaacgtcaacaacgagaaaaaagatttaatattacagtatcgaaaaatgctgaagcaataatggaatctagatctatgatatcttctatgccaacacaaacaccatccttgggagtagtttatgataaagataaaagaattcagatgttggaggatgaagtggttaatcttagaaatcaacgatctaatacaaaatcatctgataatttagataattttaccagaatactatttggtaagactccgtataaatcaacagaagttaataagcgtatagccatcgttaattatgcaaatttgaacgggtctcccttatcagtcgaggacttggatgtttgttcagaggatgaaatagatagaatctataaaacgattaaacaatatcacgaaagtagaaaacgaaaaattatcgtcactaacgtgattattattgtcataaacattatcgagcaagcattgctaaaactcggatttgaagaaatcaaaggactgagtaccgatatcacttcagaaattatcgatgtggagatcggagatgactgcgatgctgtagcatctaaactaggaatcggtaacagtccggttcttaatattgtattgtttatactcaagatattcgttaaacgaattaaaattatttaatttaatacattcccatatccagacaacaatcgtctggattaatctgttcctgtcgtctcataccggacgacatattaatctttttattagtaggcatctttttagatggtttctttttcccagcattaactgagtcgatacctagaagatcgtgattgatctctccgaccattccacgaacttctaattggccgtctctgacggtaccataaactattttaccagcattagtaacagcttggacaatctgaccatccatcgcattgtacgatgtagtagtaactgttgttctacgtctaggagcaccagaagtatttttggagcccttggaggttgatgtagaagaagacgaggattttgattttggtttacatgtaatacattttgaactctttgattttgtatcacatgcgccggcagtcacatctgtttgagaattaagattattgttgcctcctttgacggctgcatctccaccgatttgcgctagtagatttttaagctgtggtgtaatcttattaactgtttcgatataatcatcgtaactgcttctaacggctaaattttttttatccgccatttagaagctaaaaatatttttatttatacagaagatttaactagattatacaatgaactaatatgatccttttccagattatttacaaacttggtattttttggttctggaggaggcgaatttaaattcggacttggattcggattttgtgagttcttgatcttattatacatcgagtataggatggcgacggtaactgctacgcaaataccgatcaacaaaagaataccaatcatttattgacaataacttcactattgatcaagtatgcaatatatcatcttttcactaaataagtagtaataatgattcaacaatgtcgagatatatggacgataataatttagttcatggaaatatcgctatgattggtatgaatgactccgctaactctgtggggtgcgcagtgctttccccacatagaataaattagcattccgactgtgataataataccaagtataaacgccataatactcaatactttccatgtacgagtgggactggtagacttactaaagtcaataaaggcgaagatacacgaaagaatcaaaagaatgattccagcgattagcacgccggaaaaataatttccaatcataagcatcatgtccatttaactaataaaaattttaaatcgccgaatgaacaaagtggaatataaaccatataaaaacaatagtttgtactgcaaaaataatatctatttttgttttcgaagatatggtaaaattaaatagtagtacacagcatgttataactaacagcagcaacggctcgtaattacttatcatttactagacgaaaaggtggtgggatattttcttgctcaaataatacgaatatatcacccatccattttatgcgatgtttatatactctaatctttaatagatctatagacgacgggtttaccaacaatatagattttatcgattcatctaatttaaacccttccttaaacgtgaatgatctattatctggcataacgatgactctacctgatgaatcggacaatgtactgggccatgtagaataaattatcaacgaattatcgtctacgaacatttatatcatttgttttaattttaggacgcgaataaatagatataaaatagaaaataacagatattacaaccaatgttatggccgcgcccaaccaggtaggcagttttattttatcttttactacaggttctcctggatgatgtacgtcaccaacggcggacgtagttctagtacaattagacgtaagttctgcttgggaattttttaacgctaaagagttaacgttaatcgtgcacccaacgtatttacatctagttctttgaacatcttgattataatataaccattttctatctctagattcgtcggtgcactcatgtaaccaacataccctaggtcctaaatatttatctccggaattagattttggataattcgcgcaccaacaatttctatttcctttatgatcgttacaaaagacgtataatgccgtatccccaaaagtaaaataatcaggacgaataattctaataaactcagaacaatatctcgcatccatatgtttggagcaaatatcggaataagtagacatagccggtttccgttttgcacgtaaccattctaaacaattggggtttccaggatcgtttctacaaaatccagtcatgaaatcgtcacaatgttctgtcttgtaattattattaaatatttttggacagtgtttggtatttgtcttagaacaacattttgctacgctatcactatcgcccaggagataatccttttttataaaatgacatcgttgcccggatgctatataatcagtagcgtgttttaaatccttaatatattcaggagttacctcgttctgataatagattaatgatccaggacgaaatttgaaagaactacatggttctccatgaattaatacatattgtttagcaaattcaggaactataaaactactacaatgatctatcgacataccatctatcaaacaaaatttgggtttaatttctcccggagatgtttcataatagtacgtataactttcttctgcaaacttaacagctctattatattcaggataattaaaacctaattccatatatttgtctcgtatatctgctattcctggtgctattttgattctattaagagtaacagctgcccccattcttaataatcgtcagtatttaaactgttaaatgttggtatatcaacatctaccttatttcccgcagtataaggtttgttgcaggtatactgttcaggaatggttacatttatacttcttctatagtcctgtctttcgatgttcatcacatatgcaaagaacagaataaacaaaataatgtaagaaataatattaaatatctgtgaattcgtaaatacattgattgccataataattacagcagctacaatacacacaatagacattcccacagtgttgccattacctccacgatacatttgagttactaagcaataggtaataactaagctagtaagaggcaatagaaaagatgagataaatatcatcaatatagagattagaggagggctatatagagccaagacgaacaaaatcaaaccgagtaacgttctaacatcattatttttgaagattcccaaataatcattcattcctccataatcgttttgcatcatacctccatctttaggcataaacgattgctgctgttcctctgtaaataaatctttatcaagcactccagcacccgcagagaagtcgtcaagcatattgtaatatcttaaataactcatttatatattaaaaaatgtcactattaaagatggagtataatctttatgccgaactaaaaaaaatgacttgtggtcaacccctaagtctttttaacgaagacggggatttcgtagaagttgaaccgggatcatcctttaagtttctgatacctaagggattttacgcctctccttccgtaaagacgagtctagtattcgagacattaacaacgaccgataataaaatcactagtatcaatccaacaaatgcgccaaagttatatcctcttcaacgcaaagtcgtatctgaagtagtttctaatatgaggaaaatgatcgaatcaaaacgtcctctatacattactcttcacttggcgtgtggatttggtaagactattaccacgtgttatcttatggctacacacggtagaaaaaccgtcatttgcgtacccaataaaatgttaatacatcaatggaagacacaggtagaggcagtcggattggaacataagatatccatagatggagtaagtagtctattaaaggaactaaagactcaaagtccggatgtattaatagtagtcagtagacatctgacaaacgatgccttttgtaaatatatcaataagcattatgatttgttcatcttggatgaatcacatacgtataatctgatgaacaatacagcagttacaagatttttagcgtattatcctccgatgatgtgttattttttaactgctacacctagaccagctaaccgaatttattgtaacagtattattaatattgccaagttatccgatctaaaaaaaactatctatgcggtagatagtttttttgagccatattccacagataatattagacatatgataaaacgattagatggaccatctaataaatatcatatatatactgagaagttattatctgtagacgagcctagaaatcaacttattcttgataccctggtagaagaattcaagtcaggaactattaatcgaattttagttattactaaactacgtgaacatatggtattcttctacaaacgattattagatcttttcggaccagaggttgtatttataggagacgcccaaaatagacgtactccagatatggtcaaatcaatcaaggaactaaatagatttatattcgtatccaccttattttattccggtactggtttagatattcctagtttggattcgttgttcatttgctcggcagtaatcaacaatatgcaaatagagcaattactagggagggtatgtcgagaaacagaactattagataggacggtatatgtatttcctagcacatccatcaaagaaataaagtacatgataggaaatttcatgcaacgaattattagtctgtctgtagataaactaggatttaaacaaaaaagttatcggaaacatcaagaatccgatcccacttctgtatgtacaacatcctccagagaagaacgtgtattaaatagaatatttaactcgcaaaatcgttaagaagtttaagcgacgatccgcatgctgcgcaggccagtgtattacccctcatagtattaatataatccaatgatacttttgtgatgtcggaaatcttaaccaatttagactgacaggcagaacacgtcatgcaatcatcatcgtcatcgataactgtagtcttgggcttctttttgcggctcttcattccggaacgcacattggtgctatccatttaggtagtaaaaaataagtcagaatatgccctatagcacgatcgtgcaaaacctggtatatcgtctctatctttatcacaatatagtgtatcgacatctttattattattgacttcgtttatcttggaacatggaatgggaacatttttgttatcaacggccacctttgccttaattccagatgttgtaaaattataactaaacagtctatcatcgacacaaatgaaattcttgtttagacgtttgtagtttacgtatgcggctcgttcgcgtctcattttttcagatattgcaggtactataatattaaaaataagaatgaaataacataggattaaaaataaagttatcatgacttctagcgctgatttaactaacttaaaagaattacttagtctgtacaaaagtttgagattttcagattctgcggctatagaaaagtataattctttggtagaatggggaacatctacttactggaaaataggcgtgcaaaaggtagctaatgtcgagacgtcaatatctgattattatgatgaggtaaaaaataaaccgtttaatattgatccgggctattacattttcttaccggtatattttgggagcgtctttatttattcgaagggtaaaaatatggtagaacttggatctggaaactcttttcaaataccagatgatatgcgaagtgcgtgtaacaaagtattagacagcgataacggaatagactttctgagatttgttttgttaaacaatagatggataatggaagatgctatatcaaaatatcagtctccagttaatatatttaaactagctagtgagtacggattaaacatacccaaatatttagaaattgaaatagaggaagacacattatttgacgacgagttatactctattatagaacgctcttttgatgataaatttccaaaaatatccatatcgtatattaagttgggagaacttagacggcaagttgtagactttttcaaattctcgttcatgtatattgagtccatcaaggtagatcgtataggagataatatttttattcctagcgttataacaaaatcaggaaaaaagatattagtaaaagatgtagaccatttaatacgatccaaggttagagaacatacatttgtaaaagtaaaaaagaaaaacacattttccattttatacgactatgatggaaacggaacagaaactagaggagaagtaataaaacgaattatagacactataggacgagactattatgttaacggaaagtatttctctaaggttggtagtgcaggcttaaagcaattgactaataaattagatattaatgagtgcgcaactgtcgatgagttagttgatgagattaataaatccggaactgtaaaacgaaaaataaaaaaccaatcagcatttgatttaagcagagaatgtttgggatatccagaagcggattttataacgttagttaataacatgcggttcaaaatagaaaattgtaaggttgtaaatttcaatattgaaaatactaattgtttaaataacccgagtattgaaactatatatagaaactttaaccagttcgtctcaatctttaatgtcgtcaccgatgtcaaaaaaagattattcgagtgaaataatatgcgcctttgatataggtgcaaaaaatcctgccagaactgttttagaagtcaaggataactccgttagggtattggatatatcaaaattagactggagttctgattgggaaaggcgcatagctaaagatttgtcacaatatgaatacactacagttcttctagaacgtcagcctagaaggtcgccgtatgttaaatttatctattttattaaaggctttttatatcatacatcggctgccaaagttatttgcgtctcgcctgtcatgtctggtaattcatatagagatcgaaaaaagagatcggtcgaagcatttcttgattggatggacacattcggattgcgagactccgttccggatagacgcaaattagacgatgtagcggatagtttcaatttggctatgagatacgtattagataaatggaatactaattatacaccttataataggtgtaaatctaggaattacataaaaaaaatgtaataacgttagtaacgccattatggataatctatttacctttctacatgaaatagaagatagatatgccagaactatttttaactttcatctaataagttgcgatgaaataggagatatatatggtcttatgaaagaacgaatttcctcagaggatatgtttgataatatagtgtataataaagatatacatcatgccattaagaaactagtgtattgcgacatccaacttactaaacacattattaatcagaatacgtatccggtatttaacgattcttcacaagtgaaatgttgtcattatttcgatataaactcagataatagcaatattagctctcgtacagtagagatatttgagagggaaaagtcatctcttgtatcatatattaaaactaccaataagaagagaaaggtcaattacggcgaaataaagaaaactgttcatggaggcactaatgcaaattacttttccggtaaaaagtctgatgagtatctgagtactacagttagatccaacattaatcaaccttggatcaaaaccatttctaagagaatgagagtagatatcattaatcactctatagtaacgcgtggaaaaagctctatattacaaactatagaaattatttttactaatagaacatgtgtgaaaatattcaaggattctactatgcacattattctatccaaggacaaggatgaaaaggggtgtatacacatgattgacaaattattctatgtctattataatttatttctgttgttcgaagatatcatccaaaacgagtactttaaagaagtagctaatgttgtaaaccacgtacttacggctacggcattagatgagaaattattcctaattaagaaaatggctgaacacgatgtttatggagttagcaatttcaaaatagggatgtttaacctgacatttattaagtcgttggatcataccgttttcccctctctgttagatgaggatagcaaaataaagttttttaaggggaaaaagctcaatattgtagcattacgatctctggaggattgtataaattacgtgactaaatccgagaatatgatagaaatgatgaaggaaagatcgactattttaaatagcatagatatagaaacggaatcggtagatcgtctaaaagaattgcttctaaaatgaaaaaaaacactgattcagaaatggatcaacgactcggatataagtttttggtgcctgatcctaaagccggagttttttatagaccgttacatttccaatatgtatcgtattctaattttatattgcatcgattgcatgaaatcttgaccgtcaagcggccactcttatcgtttaagaataatacagaacgaattatgatagaaattagcaatgttaaagtgactcctccagattactcacctataatcgcgagtattaaaggtaagagttatgacgcattagccacgttcactgtaaatatctttaaagaggtaatgaccaaagagggtatatccatcactaaaataagtagttatgagggaaaagattctcatttgataaaaattccgctactaataggatacgggaataaaaatccacttgatacagccaagtatcttgttcctaatgtcataggtggagtctttatcaataaacaatctgtcgaaaaagtaggaattaatctagtagaaaagattacaacatggccaaaatttagggttgttaagccaaactcattcactttctcgttttcctccgtatcccctcctaatgtattaccgacaagatatcgccattacaagatatctctggatatatcacaattggaagcgttgaatatatcatcgacaaagacatttataacggtcaatattgttttgctgtctcaatatttatctagagtgagtctagaattcattagacgtagcttatcatacgatatgcctccagaagttgtctatctagtaaacgcgataatagatagtgctaaacgaattactgaatctattactgactttaatattgatacatacattaatgacctggtggaagctgaacacattaaacaaaaatctcagttaacgatcaacgagttcaaatatgaaatgctgcataactttttacctcatatgaactatacacccgatcaactaaagggattttatatgatatctttactaagaaagtttctctactgtatctaccacacttctagatatccagatagagattcgatggtttgtcatcgtatactaacatacggcaaatattttgagacgttggcacatgatgaattagagaattacataggcaacatccgaaacgatatcatgaacaatcacaagaacagaggcacttacgcggtaaacattcatgtactaacaactcctggacttaatcatgcattttctagcttattgagtggaaagttcaaaaagtcagacggtagttatcgaacacatcctcactattcatggatgcagaatatttctattcctaggagtgttggattttatccggatcaagtaaagatttcaaagatgttttctgtcagaaaataccatccaagtcaatatctttacttttgttcatcagacgttccggaaagaggtcctcaggtaggtttagtatctcaattgtctgtcttgagttccattacaaatatactaacgtctgagtatttggatttggaaaagaaaatttgtgagtatatcagatcatattataaagatgatataagttactttgaaacaggatttccaatcactatagaaaatgctctagtcgcatctcttaatccaaatatgatatgtgattttgtaactgactttagacgtagaaaacggatgggattcttcggtaacttggaggtaggtattactttagttagggatcacatgaatgaaattcgcattaatattggagcgggaagattagtcagaccattcttggttgtggataacggagagctcatgatggatgtgtgtccggagttagaaagcagattagacgatatgacattctctgacattcagaaagagtttccacatgtcatcgaaatggtagatatagaacaatttacttttagtaacgtatgtgaatcggttcaaaaatttagaatgatgtcaaaggatgaaagaaagcaatacgatttatgtgactttcctgccgaatttagagatggatatgtggcatcttcattagtgggaatcaatcacaattctggacccagagctattcttggatgtgctcaagctaaacaagctatctcttgtctgagttcggatatacgaaataaaatagacaatggaattcatttgatgtatccagagaggccaatcgtgattagtaaggctttagaaacttcaaagattgcggctaattgcttcggccaacatgttactatagcattaatgtcgtacaaaggtatcaatcaagaggatggaattatcatcaaaaaacaatttattcagagaggcggtctcgatatagttaccgcaaagaaacatcaagtagaaattccgttggaaaactttaataacaaagaaagagataggtctaatgcatattcgaaattagaaagtaatggattagttagactgaatgctttcttggaatccggagacgctatggcacgaaatatctcatcaagaactcttgaagatgattttgctagagataatcagattagcttcgatgtttccgagaaatataccgatatgtacaaatctcgcgttgaacgagtacaagtagaacttactgacaaagttaaggtacgagtattaaccatgaaagaaagaagacccattctaggagacaaatttaccactagaacgagtcaaaagggaacagtcgcgtatgtcgcggatgaaacggaacttccatacgatgaaaatggtatcacaccagatgtcattattaattctacatccatcttctctagaaaaactatatctatgttgatagaggttattttaacagccgcatattctgctaagccgtacaacaataagggagaaaaccgacctgtctgttttcctagtagtaacgaaacatccatcgatacatatatgcaattcgctaaacaatgttatgagcattcaaatccgaaattgtctgatgaagaattatcggataaaatcttttgtgaaaagattctctatgatcctgaaacggataagccttatgcatccaaagtattttttggaccaatttattacttgcgtctgaggcatttaactcaggacaaggcaaccgttagatgtagaggtaaaaagacgaagctcattagacaagcgaatgagggacgaaaacgtggaggaggtattaagtttggagaaatggagagagactgtttaatagcgcatggcgcagccaatactattacagaagttttgaaagattcggaagaagattatcaagatgtgtatgtttgtgaaaattgtggagacatagcagcacaaatcaagggtattaatacatgtcttagatgttcaaaacttaatctctctcctctcttaacaaaaattgataccacgcacgtatctaaagtatttcttactcaaatgaacgccagaggcgtaaaagtcaaattagatttcgaacgaaggcctccttcgttttataaaccattagataaagttgatctcaagccgtcttttctggtgtaatattctagtttggtagtagatacatatcaatatcatcaaattcgagatccgaattataaaatgggcgtggattgttaactatagaatcggacgtctgatattcgaaaatctgtggagtttcaggttttggtggaggtgtaactgctacttgggatactgaagtctgatattcagaaagctgggggatgttctggttcgacatccaccgatggtgtcacatcactaatcggttcggtaacgtctgtggatggaggtgctacttctacagaacctgtagcctcagttgtcaacggagatacatttttaatgcgaggaaatgtataatttggtaatggtttctcatgtggatctgaagaagaggtaagatatctactagaaagataccgatcacgttctagttctcttttgtagaacttaactttttctttctcagcatctagttgatattccaacctcttcacgttactacgttcagatttcaattcacgttcgcatgggttacctccgcagtttttacgagcgatttcacgttcagccttcatgcgtctctgtgatccgtttacgttaaaccataaatacatgggtgatcctataaacatgaatttatttctaattctcagagctatagttaattgaccgtgtaatatttgcttacatgcatacttgatacgctcattaataagatttttatcattgctcgttatctcagaatcgtatatataaggagtaccatcgtgattcttaccagatattatacaaaatactatatataaaatatattgaccaacgttagtaatcatataaatgtttaacgttttaaattttgtattcaatgatccattatcatacgctagcatggtcttatgatattcattctttaaaatataatattgtgttagccattgcattggagctcctaatggagattttctattctcgtccattttaggatatgctttcataaagtccctaataacttcgtgaataatgtttctatgttttctactgatgcatgtatttgcttcgatttttttatcccatgtttcatctatcatagatttaaacgcagtaatgctcgcaacattaacatcttgaaccgttggtacaattccgttccataaatttataatgttcgccatttatataactcattttttgaatatacttttaattaacaaaagagttaagttactcatatggacgccgtccagtctgaacatcaatctttttagccagagatatcatagccgctcttagagtttcagcgtgattttccaacctaaatagaacttcatcgttgcgtttacaacacttttctatttgttcaaactttgttgttacattagtaatctttttttccaaattagttagccgttgtttgagagtttcctcattgtcgtcttcatcggctttaacaattgcttcgcgtttagcctctggctttttatcagcctttgtagaaaaaaattcagttgctggaattgcaagatcgtcatctccggggaaaagagttccgtccatttaaagtacagattttagaaactgacactctgcgttatttatatttggtacaacacatggattataaatattgatgttaataacatcagaaaatgtaaagtctatacattgttgcatcgtgttaaattttctaatggatctagtattattgggtccaacttctgcctgaaatccaaatatggaagcggatacaaaaccgtttcctggataaaccacacatctccacttttgctttacatcagaaattgtgtcgttgacatcttgaactctcctatctaatgccggtgttccacctatagattttgaatattcgaatgctgcatgagtagcattaaattccttaatattgccataattttcatatattgagtaaccctggataaaaagtaaacacaccgcagccgtcgctaccacaataaaaaaaattgatagagagttcatttataatctattagaagctgacaaaatttttttacacgcatcagacaatgctttaataaatagttcaacatctacttttgtcatatcgaaccgatggtatgattctaacctagaattacatccgaaaaagttgactatgttcatagtcattaagtcattaacaaacaacattccagactctggattataagacgatactgtttcgtcacaatcacctaccttaatcatgtgattatgaatattggctattagagcaccttctaagaaatctataatatctttgaaacacgatttaaaatcaaaccacgaatatacttctacgaagaaagttagtttacccataggagagataactataaatggagatctaaatacaaaatccggatctatgatagttttaacattattatattctctattaaatacctccacatctaaaaatgttaattttgaaactatgtcttcgtttattaccgtacctgaactaaacgctataagctctattgtttgagaactctttaaacgatattcttgaaatacatgtaacaaagtttcctttaactcggtcggtttatctaccatagttacagaatttgtatccttatctataatataataatcaaaatcgtataaagttatataattatcgcgttcagattgggatcttttcaaatagactaaaaaccccatttctctagtaagtatcttatgtatatgtttgtaaaatatcttcatggtgggaatatgctctaccgcagttagccattcctcattgacagcggtagatgtattagacaaaactattccaatgtttaacaagggccattttacgagattattaaatccttgtttgataaatgtagccaatgagggttcgagttcaacgacgattgaattctcttcccgcggatgctgcatgatgaacgacgggatgttgttcgattgatttggaattctttttcgactttttgtttatattaaatattttaaaatttatagctgatagcaattcatgtaccacggataatgtagacgcgtattgcgcatcgatatctttattattagataaatttatcaataaatgtgagaagtttgcctcgttaaggtcttccatttaaatattatataaacatttgtgtttgtatcttattcgtcttttatggaatagttttttactagtaaagctgcaattacacactttgtccgtaaaacataaatataaacaccagcttttatcaatcgttccaaaaagtcgacggcggacatttttaacatggcatctattttaaatacacttaggtttttggaaaaaacatcattttataattgtaacgattcaataactaaagaaaagattaagattaaacataagggaatgtcatttgtattttataagccaaagcattctaccgttgttaaatacttgtctggaggaggtatatatcatgatgatttggttgtattggggaaggtaacaattaatgatctaaagatgatgctattttacatggatttatcatatcatggagtgacaagtagtggagtaatttacaaattgggatcgtctatcgatagactttctctaaataggactattgttacaaaagttaataattatgatgatacattttttgacgacgatgattgatcgctattgcacaattttgtttttttactttctaatatagcgtttagattctttttcatgtgcgaatattgatttactaaaatatcgatgtttaacttttgttctatgacgtccttatcggcggtatcggtacatatacgtaattcaccttcacaaaatacggagtcttcgataataatagccaatcgattattggatctagctgtctgtatcatattcaacatgtttaatatatcctttcgtttcccctttacaggcatcgatcgtagcatattttccgcgtctgagatggaaatgttaaaactacaaaaatgcgtaatgttagcccgtcctaatattggtacgtgtctataagtttggcatagtagaataatagacgtgtttaaatgccttccaaagtttaagaattctattagagtattgcattttgatagtttatcgcctacatcatcaaaaataagtaaaaagtgtgctgattttttatgattttgtgcgacagcaatacatttttctatgttacttttagttcgtatcagattatattctagagattcctgactactaacgaaattaatatgatttggccaaatgtatccatcataatctgggttataaacgggtgtaaacaagaatatatgtttatattttttaactagtgtagaaaacagagatagtaaatagatagtttttccagatccagatcctcccgttaaaaccattctaaacggcatttttaataaattttctcttgaaaattgtttttcttggaaacaattcataattatatttacagttactaaattaatttgataataaatcaaaatatggaaaactaaggtcgttagtagggaggagaacaaagaaggcatatcgtgatataaataacatttattatcatgatgacaccagaaaacgacgaagagcagacatctgtgttctccgctactgtttacggagacaaaattcaaggaaagaataaacgcaaacgcgtgattggtctatgtattagaatatctatggttatttcactactatctatgattaccatgtccgcgtttctcatagtgcgcctaaatcaatgcatgtctgctaacgaggctgctattactgacgccgctgttgccgttgctgctgcatcatctactcatagaaaggttgcgtctagcactacgcaatatgatcacaaagaaagctgtaatggtttatattaccagggttcttgttatatattacattcagactaccagttattctcggatgctaaagcaaattgcactgcggaatcatcaacactacccaataaatccgatgtcttgattacctggctcattgattatgttgaggatacatggggatctgatggtaatccaattacaaaaactacatccgattatcaagattctgatgtatcacaagaagttagaaagtatttttgtgttaaaacaatgaactaatatttatttttgtacattaataaatgaaatcgcttaatagacaaactgtaagtatgtttaagaagttgtcggtgccggccgctataatgatgatactctcaaccattattagtggcataggaacatttctgcattacaaagaagaactgatgcctagtgcttgcgccaatggatggatacaatacgataaacattgttatctagataccaacattaaaatgtccacagataatgcggtttatcagtgtcgtaaattacgagctagattgcctagacctgatactagacatctgagagtattgtttagtattttttataaagattattgggtaagtttaaaaaagaccaataataaatggttagatattaataatgataaagatatagatattagtaaattaacaaattttaaacaactaaacagtacgacggatgctgaagcgtgttatatatacaagtctggaaaactggttaaaacagtatgtaaaagtactcaatctgtactatgtgttaaaaaattctacaagtgacaacaaaaaatgaattaataataagtcgttaacgtacgccgccatggacgccgcgtttgttattactccaatgggtgtgttgactataacagatacattgtatgatgatctcgatatttcaatcatggactttataggaccatacattataggtaacataaaaactgtccaaatagatgtacgggatataaaatattccgacatgcaaaaatgctactttagctataagggtaaaatagttcctcaggattctaatgatttggctagattcaacatttatagcatttgtgccgcatacagatcaaaaaataccatcatcatagcatgcgactatgatatcatgttagatatagaagataaacatcagccattttatctattcccatctattgatgtttttaacgctacaatcatagaagcgtataacctgtatacagctggagattatcatctaatcatcaatccttcagataatctgaaaatgaaattgtcgtttaattcttcattctgcatatcagacggcaatggatggattataattgatgggaaatgcaatagtaattttttatcataaaagttgtaaagtaaataataaaacaataaatattgaactagtagtacgtatattgagcaatcagaaatgatgctggtacctcttatcacggtgacagtagttgcgggaacaatattagtatgttatatattatatatttgtaggaaaaagatacgtactgtctataatgacaataaaattatcatgacaaaattaaaaaagataaagagttctaattccagcaaatctagtaaatcaactgatagcgaatcagactgggaggatcactgtagtgctatggaacaaaacaatgacgtagataatatttctaggaatgagatattggacgatgatagcttcgctggtagtttaatatgggataacgaatccaatgttatggcgcctagcacagaacacatttacgatagtgttgctggaagcacgctgctaataaataatgatcgtaatgaacagactatttatcagaacactacagtagtaattaatgaaacggagactgttgaagtacttaatgaagataccaaacagaatcctaactattcatccaatcctttcgtaaattataataaaaccagtatttgtagcaagtcaaatccgtttattacagaacttaacaataaatttagtgagaataatccgtttagacgagcacatagcgatgattatcttaataagcaagaacaagatcatgaacacgatgatatagaatcatcggtcgtatcattggtgtgattagtttcctttttataaaattgaagtaatatttagtattattgctgccgtcacgttgtacaaatggagatattccctgtattcggcatttctaaaattagcaattttattgctaataatgactgtagatattatatagatacagaacatcaaaaaattatatctgatgagatcaatagacagatggatgaaacggtacttcttaccaacatcttaagcgtagaagttgtaaatgacaatgagatgtaccatcttattccccatagactatcgactattatactctgtattagttctgtcggaggatgtgttatctctatagataatgacgtcaatggcaaaaatattctaacctttcccattgatcatgctgtaatcatatccccactgagtaaatgtgtcgtagttagcaagggtcctacaaccatattggttgttaaagcggatatacctagcaaacgattggtaacatcgtttacaaacgacatactgtatgtaaacaatctatcactgattaattatttgccgttgtctgtattcattattagacgagttaccgactatttggatagacacatatgcgatcagatatttgcgaataataagtggtattccattataaccatcgacaataagcagtttcctattccatcaaactgtataggtatgtcctctgccaagtacataaattctagcatcgagcaagatactttaatacatgtttgtaacctcgagcatccattcgacttagtatacaaaaaaatgcagtcgtacaattctgtacctatcaaggaacaaatattgtacggtagaattgataatataaatatgagcattagtatttctgtgtattaatagatttctagtatggggatcattaatcatctctaatctctaaatacctcataaaacgaaaaaaaagctattatcaaatactgtacggaatggattcattctcttctctttttatgaaactctgttgtatatctactgataaaactggaagcaaaaaatctgatagaaagaataagaataagatcaagatcaaggattatatggaacacgattattataaaataacaatagttcctggttcctcttccacgtctactagctcgtggtattatactcatgcctagtaatagtctctttgcgttgacggaaagcagactagaaataacaggctaaaatgttcagacaccataatagttcccaacccagataataacagagtaccatcaacacattcctttaaactcaatcccaaacccaaaaccgttaaaatgtatccggccaattgatagtagataatgaggtgtacagcgcatgataatttacacagtaaccaaaatgaaaatactttagtaattataagaaatatagatggtaacgtcatcatcaacaatccaataatatgccggagagtaaacattgacggataaaacaaaaatgctccgcataactctatcatggcaataacacaaccaaatacttgtaagattcctaaattagtagaaaatacaacggatatcgatgtataagtgatctcgagaaataataagaataaagtaatgcccgtaaagataaacatcaacattgtttggtaatcattaaaccaattagtatgaagttgaactaatttcacagtagattttattccagtgttatcctcgcatgtataagtacctggtaagatatctttatattctataatcaatgagacatcactatccgataacgaatgaagtctagcactagtatgccatttacttaatattgtcgtcttggaagttttattataagttaaaatatcatggttatccaatttccatctaatatactttgtcggattatctatagtacacggaataatgatggtatcattacatgctgtatactctatggtctttgtagttgttataacaaccaacgtatagaggtatatcaacgatattctaactcttgacattttttatttatttaaaatgatacctttgttatttattttattctattttgctaacggtattgaatggcataagtttgaaacgagtgaagaaataatttctacttacttattagacgacgtattatacacgggtgttaatggggcggtatacacattttcaaataataaactaaacaaaactggtttaactaataataattatatcacaacatctataaaagtagaggatgcggataaggatacattagtatgcggaaccaataacggaaatcccaaatgttggaaaatagacggttcagacgacccaaaacatagaggtagaggatacgctccttatcaaaatagcaaagtaacgataatcagttacaacgaatgtgtactatctgacataaacatatcaaaagaaggaattaaacgatggagaagatttgacggaccatgtggttatgatttatacacggcggataacgtaattccaaaagatggtttacgaggagcattcgtcgataaagatggtacttatgacaaagtttacattcttttcactgatactatcggctcaaagagaattgtcaaaattccgtatatagcacaaatgtgcctaaacgacgaaggtggtccatcatcattgtctagtcatagatggtcgacgtttctcaaagtcgaattagaatgtgatatcgacggaagaagttatagacaaattattcattctagaactataaaaacagataatgatacgatactatatgtattcttcgatagtccttattccaagtccgcattatgtacctattctatgaataccattaaacaatctttttctacgtcaaaattggaaggatatacaaagcaattgccgtctccagctcctggtatatgtttaccagctggaaaagttgtttcacataccacgtttgaagtcatagaaaaatataatgtactagatgatattataaagcctttatctaaccaacctatcttcgaaggaccgtctggtgttaaatggttcgatataaaggagaaggaaaatgaacatcgggaatatagaatatacttcataaaagaaaattctatatattcgttcgatacaaaatctaaacaaactcgtagctcgcaagtcgatgcgcgactattttcagtaatggtaacttcgaaaccgttatttatagcagatatagggataggagtaggaatgccacaaatgaaaaaaatacttaaaatgtaatcttaatcgagtacaccacacgacaatgaacaaacctaagacagattatgctggttatgcttgctgcgtaatatgcggtctaattgtcggaattatttttacagcgacactattaaaagttgtagaacgtaaattagttcatacaccatcaatagataaaacgataaaagatgcatatattagagaagattgtcctactgactggataagctataataataaatgtatccatttatctactgatcgaaaaacctgggaggaaggacgtaatacatgcaaagctctaaatccaaattcggatctaattaagatagagactccaaacgagttaagttttttaagaagccttagacgaggctattgggtaggagaatccgaaatattaaaccagacaaccccatataattttatagctaaaaatgccacgaagaatggaaatatatttgtagcacaacgaatactcccaaactgcattcgtgttacactatataacaattacactacatttttatcataccactacttcggttagatgttttagaaaaaaataaatatcgccgtaccgttcttgtttttataaaaataacaattaacaattatcaaattttttctttaatattttacgtggttgaccattcttggtggtaaaataatctcttagtgttggaatggaatgctgtttaatgtttccgcactcatcgtatattttgacgtatgcagtcacatcgtttacgcaatagtcagactgtagttctatcatgcttcctacatcagaaggaggaacagttttaaagtctcttggttttaatctattgccattagttttcatgaaatcctttgttttatccacttcacattttaaataaatgtccactatacattcttctgttaattttactagatcgtcatgggtcatagaatttataggttccgtagtccatggatccaaactagcaaacttcgcgtatacggtatcgcgattagtgtatacaccaacagtatgaaaattaagaaaacagtttaatagatcaacagaaatatttaatcctccgtttgatacagatgcgccatatttatggatttcggattcacacgttgtttgtctgaggggttcgtctagcgttgcttctacgtaaacttcgattcccatatattctttattgtcagaatcgcataccgatttatcatcatacactgtttgaaaactaaatggtatacacatcaaaataataaataataacgagtacattctgcaatattgttatcgtaattggaaaaatagtgttcgagtgagttggattatgtgagtattggattgtatattttattttatattttatattttatattttgtaataagaataaaatgctaatgtcaagtttattccaatagatgtcttattaaaaaacatatataataaataacaatggctgaatggcataaaattatcgaggatatctcaaaaaataataagttcgaggatgccgccatcgttgattacaagactacaaagaatgttctagctgctattcctaacagaacatttgccaagattaatccgggtgaaattattcctctcatcactaatcgtaatattctaaaacctcttattggtcagaaatattgtattgtatatactaactctctaatggatgagaacacgtatgctatggagttgcttactgggtacgcccctgtatctccgatcgttatagcgagaactcataccgcacttatatttttgatgggtaagccaacaacatccagacgtgacgtgtatagaacgtgtagagatcacgctacccgtgtacgtgcaactggtaattaaaataaaaagtaatattcatatgtagtgtcaattttaaatgatgatgatgaaatggataatatccatattgacgatgtcaataatgccggtattggcatacagctcatcgatttttagatttcattcagaggatgtggaattatgttatgggcatttgtattttgataggatctataatgtagtaaatataaaatataatccgcatattccatatagatataattttattaatcgcacgttaaccgtagatgaactagacgataatgtcttttttacacatggttattttttaaaacacaaatatggttcacttaatcctagtttgattgtctcattatcaggaaacttaaaatataatgatatacaatgctcagtaaatgtatcgtgtctcattaaaaatttggcaacgagtacatctactatattaacatctaaacataagacttattctctacatcggtccacgtgtattactataataggatacgattctattatatggtataaagatataaatgacaagtataatgacatctatgattttactgcaatatgtatgctaatagcgtctacattgatagtgaccatatacgtgtttaaaaaaataaaaatgaactcttaattatgctatgctattagaaatggataaaatcaaaattacggttgattcaaaaattggtaatgttgttaccatatcgtataacttggaaaagataactattgatgttacaccaaaaaagaaaaggatgtattattagcgcaatcagttgctgtcgaagaggcaaaagatgtcaaggtagaagaaaaaaatattatcgatattgaagatgacgatgatatggatgtagaaagcgcgtaatactatctataaacataagtatataataaatactttttatttacggtactcttgtagtggtgataccctactcgattatttttttaaaaaaaaaatacttattctgattcttctaaccatttccgtgttcgtttgaatgccacatcgacgtcaaagataggggagtagttgaaatctagttctgcattgttggtacgcacctcaaatgtagtgttggatatcttcaacgtatagttgttgagtagtgatggttttctaaatagaattctcttcatatcattcttgcacgcgtacatttttagcatccatcttggaatcctagatccttgttctattcccaatggtttcatcaatagaagattaaacatatcgtacgaacacgatggagagtaatcgtagcaaaagtaagcatttcctttaatcttagatcccggatactggatatattttgcagccaacacgtgcatccatgcagcatttcctacatatacccggctatgtaccgcgttatcatcgactgtacgatacataatgttaccgtgttgcttacattgctcgtaaaagactttcgtcaatttgtctccttctccgtaaattccagtgggtcttaggcaacaagtatacaattttgctccattcatgattacggaattattggctttcataaccagttgctcggccatacgtttactttttgcgtatacatgtcctggtgatatatcataaagggtatgctcatggccgatgaatggatcaccgtgtttattgggtcctattgcttccatgctactagtatagatcaaatacttgattcctaggtccacacaagctgccaatatagtctgtgttccataatagtttactttcatgatttcattatcggtgtattttccaaatacatccactagagcagccgtatgaataatcagatttaccccatctagcgcttctctcaccttatcaaagtcgtttatatcacattgtatatagtttataaccttaactttcgaggttattggttgtggatcttctacaatatctatgactctgatttcttgaacatcatctgcactaattaacagttttactatatacctgcctagaaatccggcaccaccagtaaccgcgtacacggccattgctgccactcataatatcagactacttattctattttactaaataatggctgtttgtataatagaccacgataatatcagaggagttatttactttgaaccagtccatggaaaagataaagttttaggatcagttattggattaaaatccggaacgtatagtttgataattcatcgttacggagatattagtcaaggatgtgattccataggcagtccagaaatatttatcggtaacatctttgtaaacagatatggtgtagcatatgtttatttagatacagatgtaaatatatttacaattattggaaaggcgttatctatttcaaaaaatgatcagagattagcgtgtgaagttattggtatttcttacataaatgaaaagataatacattttcttacaattaacgagaatggcgtttgatatatcagttaatgcgtctaaaacaataaatgcattagtttacttttctactcagcaaaataaattagtcatacgtaatgaagttaatgatacacactacactgtcgaatttgatagggacaaagtagttgacacgtttatttcatataatagacataatgacaccatagagataagaggggtgcttccagaggaaactaatattggttgcgcggttaatacgccggttagtatgacttacttgtataataagtatagttttaaactgattttagcagaatatataagacacagaaatactatatccggcaatatttattcggcattgatgacactagatgatttggctattaaacagtatggagacattgatctattatttaatgagaaacttaaagtagactccgattcgggactatttgactttgtcaactttgtaaaggatatgatatgttgtgattctagaatagtagtagctctatctagtctagtatctaaacattgggaattgacaaataaaaagtataggtgtatggcattagcgaacatatatctgatagtattccaatatctgagctatctagactacgatacaatctatgtaagtatctacgcgggcacactgagagcatagaggatgaatttgattattttgaagacgatgattcgtctacatgttctgccgtaaccgacagggaaacggatgtataattttttttatagcgtgaaggatatgataaaaaatataattgttgtatttatcccattccaatcaccttatatgattctgtaaaaaaattatactgtaacacaataaaggagtcttatagatgtatagaggtcagatactggtttgataaactgtttattccacataagtatgtttgactttatggttagacccgcatactttaacaaatcactgaaaattggagttaggtattgacctctcagaatcagttgccgttctggaacattaaatgtattttttatgatatactccaacgcatttatgtgggcatacaacaagtcattactaatggagtattccaagagttttagttgtctagtatttaacaagagaagagatttcaacagactgtttatgaactcgaatgccgcctcattgtcgcttatattgatgatgtcgaattctcccaatatcatcaccgatgagtagctcatcttgttatcgggatccaagttttctaaagatgtcattaaaccctcgatcatgaatggatttatcatcatcgtttttatgttggacatgagcttagtccgtttgtccacatctatagacgacgatttctgaattatttcatatatccctctctttaactccaggaacttgtcaggatggtctactttaatatgttctcgtctaagagatgaaaatctttggatggttgcacgcgacttttctctaaaggatgacgttgcccaagatcctctcttaaatgaatccatcttatccttggacaagatggacagtctattttccttagatggtttaatatttttgttacccatgatctataaaggtagacctaatcgtctcggatgaccatatatttattttcagttttattatacgcataaattgtaaaaaatatgttaggtttacgaaaatgtctcgtggggcattaatcgtttttgaaggattggacaaatctggaaaaacaacacaatgtatgaacatcatggaatctataccggcaaacacgataaaatatcttaactttcctcagagatccactgtcactggaaagatgatagatgactatctaactcgtaaaaaaacctataatgatcatatagttaatctattattttgtgcaaatagatgggagtttgcatcttttatacaagaacaactagaacagggaattactttaatagttgatagatacgcattttctggagtagcgtatgccgccgctaaaggcgcgtcaatgactctcagtaagagttatgaatctggattgcctaaacccgacttagttatattcttggaatctggtagcaaagaaattaatagaaacgtcggcgaggaaatttatgaagatgttacattccaacaaaaggtattacaagaatataaaaaaatgattgaagaaggagatattcattggcaaattatttcttctgaattcgaggaagatgtaaagaaggagttgattaagaatatagttatagaggctatacacacggttactggaccagtggggcaactgtggatgtaatagtgaaattacattttttataaatagatgttagtacagtgttataaatggatgaagcatattactctggcaacttggaatcagtactcggatacgtgtccgatatgcataccgaactcgcatcaatatctcaattagttattgccaagatagaaactatagataatgatatattaaacaaggacattgtaaattttatcatgtgtagatcaaacttggataatccatttatctctttcctagatactgtatatactattatagatcaagagaactatcagactgagttgattaattcattagacgacaatgaaattatcgattgtatagttaataagtttatgagcttttataaggataacctagaaaatatagtagatgctatcatcactctaaaatatataatgaataatccagattttaaaactacgtatgccgaagtactcggttccagaatagccgatatagatattaaacaagtgatacgtaagaatatactacaattgtctaatgatatccgcgaacgatatttgtgaaaaatattaaaaaaaaatactttttttattaaatgacgtcgcttcgcgaatttagaaaattatgctgtgatatatatcacgcatcaggatataaagaaaaatctaaattaattagagactttataacagatagggatgataaatatttgatcattaagctattgcttcccggattagacgatagaatttataacatgaacgataaacaaattataaaattatatagtataatatttaaacaatctcaggaagatatgctacaagatttaggatacggatatataggagacactattaggactttcttcaaagaaaacacagaaatccgtccaagagataaaagcattttaactttagaagacgtggatagtttcttaactacgttatcatccgtaactaaagaatcgcatcaaataaaattattgactgatatcgcatccgtttgtacatgtaatgatttaaaatgtgtagtcatgcttattgataaagatctaaaaattaaagcgggtcctcggtacgtacttaacgctattagtcctaatgcctatgatgtgtttagaaaatctaataacttgaaagagataatagaaaattcatctaaacaaaatctagactctatatctatttctgttatgactccaattaatcccatgttagcggaatcgtgtgattctgtcaataaggcgtttaaaaaatttccatcaggaatgtttgcggaagtcaaatacgatggtgaaagagtacaagttcataaaaataataacgagtttgccttctttagtagaaacatgaaaccagtactctctcataaagtggattatctcaaagaatacataccgaaagcatttaaaaaagctacgtctatcgtattggattctgaaattgttcttgtagacgaacataatgtaccgctcccgtttggaagtttaggtatacacaaaaagaaagaatataaaaactctaacatgtgtttgttcgtgtttgactgtttgtactttgatggattcgatatgacggacattccattgtacgaacgaagatcttttctcaaagatgttatggttgaaatacccaatagaatagtattctcagagttgacgaatattagtaacgagtctcagttaactgacgtattggatgatgcactaacgagaaaattagaaggattggtcttaaaagatattaatggagtatacgaaccgggaaagagaagatggttaaaaataaagcgagactatttgaacgagggttccatggcagattctgccgatttagtagtactaggtgcctactatggtaaaggagcaaagggtggtatcatggcagtctttctaatgggttgttacgacgatgaatccggtaaatggaagacggtaactaaatgttccggtcacgatgataatacgttaagggttttgcaagaccaattaacgatgattaaaattaacaaggatcccaaaaaaattccagagtggttagtagttaataaaatctatattcccgattttgtagtagaggatccgaaacaatctcagatatgggaaatttcaggagcagagtttacatcttccaagtcccataccgcaaatggaatatccattagatttcctagatttactaggataagagaggataaaacgtggaaagaatctactcatctaaacgatttagtaaacttgactaaatcttaatagttacatacaaactgaaaattaaaataacaccatttagttggtggtcgccatggatggtgttattgtatactgtctaaacgcgttagtaaaacatggcgaggaaataaatcatataaaaaatgatttcatgattaaaccatgttgtgaaagagtttgtgaaaaagttaagaacgttcacattggcggacaatctaaaaacaatacagtgattgcagatttgccatatatggataatgctgtatcggatgtatgcaattcactgtataaaaagaatgtatcaagaatatccagatttgctaatttgataaagatagatgacgatgacaagactcctactggtgtatataattattttaaacctaaagatgttattcctgttatcatatctataggaaaggataaagatgtctgtgaactattaatctcatcagacatatcgtgtgcatgcgtggagttaaattcatataaagtagccattcttcccatggatgtttccttttttaccaaaggaaatgcatcattgattattctcctgtttgatttctctatcgatgcagcacctctcttaagaagtgtaaccgataataatgttattatatctagacaccagcgtctacatgacgagcttccgagttccaattggttcaagttttacataagtataaagtccgactattgttctatattatatatggttgttgatggatctgtgatgcatgcgatagctgataatagaactcacgcaattattagcaaaaatatattagacaatactacgattaacgatgagtgtagatgctgttattttgaaccacagattaggattcttgatagagatgagatgctcaatggatcatcgtgtgatatgaacagacattgtattatgatgaatttacctgatgtaggcgaatttggatctagtatgttggggaaatatgaacctgacatgattaagattgctctttcggtggctggtaatttaataagaaatcgagactacattcccgggagacgaggatatagctactacgtttacggtatagcctctagataatttttttaagcacgaaataaaaaacataattttaaaccaatctatttcatactattttgtgtgatcaccatggacataaagatagatattagtatttctggtgataaatttacggtgactactaggagggaaaatgaagaaagaaaaaaatatctacctctccaaaaagaaaaaactactgatgttatcaaacctgattatcttgagtacgatgacttgttagatagagatgagatgtctactattctagaggaatattttatgtacagaggtctattaggcctcagaataaaatatggacgactctttaacgaaattaaaaaattcgacaatgatgcggaagaacaattcggtactatagaagaactcaagcagaaacttagattaaattctgaagagggagcagataactttatagattatataaaggtacaaaaacaggatatcgtcaaacttactgtatacgattgcatatctatgataggattgtgtgcatgcgtggtagatgtttggagaaatgagaaactgttttctagatggaaatattgtttacgagctattaaactgtttattaatgatcacatgcttgataagataaaatctatactgcagaatagactagtatatgtggaaatgtcatagaaagttaaaagttaatgagagcaaaaatatataaggttgtattccatatttgttattttttctgtaatagttaaaaaaatacattcgatggtctatctatcagattattatgtgttataaggtactttttctcataataaactagagtatgagtaagatagtgtttttcaaaacatataaatctaaaattgatggatgagatatacagctattaatttcgaaaatatattttaatctgataactttaaacatggatttttgatggtggtttaacgttttaaaaaaagattttgttattgtagtatatgataatattaaaagatggatataaagaatttgctgactgcatgtactattttttacattactacattggctacggcagatatacctactccgccaccaacgggtcatgtgacaagggagaatatcttgataagaggcataatcaatgttgtaatcggtgtccacctggagaatttgccaaggttagatgtaatggtaacgataacacaaaatgtgaacgctgcccacctcatacatataccacaatcccaattattctaatggatgtcatcaatgtagaaaatgcccaacaggatcatttgataaggtaaagtgtaccggaacacagaacagtaaatgttcgtgtcttcctggttggtattgcgctactgattcttcacagactgaagattgttgaaattgtataccaaaaaggagatgtccatgcggatactttggtggaatagatgaacaaggaaatcctatttgtaaatcgtgttgtgttggtgaatattgcgactacctacgtaattatagacttgatccatttcctccatgcaaactatctaaatgtaattaattatgattttgatgataatgttaccatacattatatcgctacttggttagtgtattattcagtatgaagacctattaataattacttatcttttgacgatcttgttataattataatataaaaatacttatggcatagtaactcataattgctgacgcgataaattcgtaataatctgttttgttcaaaggaatctacaggcataaaaataaaaatataatttataatatactcttacaacgccatcatgaataacagcagtgaattgattgctgttattaatggatttagaaatagtggacgattttgtgatattaatatagttattaatgatgaaaggataaacgctcataaactcatcctatctggagcctccgaatatttttccattctgttttccaataattttatcgattctaatgaatacgaagttaatctaagtcatttagattatcaaagtgttaacgatttgatcgattacatttatgggatacctttgagcctaactaacgataacgtgaaatatattctttcaaccgctgattttttacaaattggatctgccattacggagtgtgaaaattacatacttaaaaatctttgttctaaaaactgtatcgatttctacatatacgctgataaatataataacaagaaaatagaatcagcgtcgtttaacacaatattacaaaatattttgagactcatcaacgatgaaaactttaaatacttaacagaggaatcaatgataaaaattttaagcgatgatatgttaaatataaaaaatgaggatttcgccccactaattctcattaaatggttagagagtactcaacaatcatgcaccgtcgagttacttaaatgcctcagaatatcattgctttccccacaagttataaaatcactttatagtcatcgactggttagttcaatctacgaatgtataacattcttaaacaatatagcattcttggatgaatcatttcctagataccatagcatcgagttgatatctatcggtataagtaattcgcgtgataaaatttccataaactgctacaatcataaaaaaaatacatgggaaatgatatcttcacgtagatataggtgtagtttcgcagtggccgtcctggataatattatttatatgatgggtggatatgatcagtccccgtatagaagttcaaaggttatagcgtacaatacatgtacaaattcttggatatatgatataccagagctaaaatatcctcgttctaattgtgggggactggctgatgacgaatacatttattgtataggcggcatacgcgatcaggattcatcgttgacatctagtattgataaatggaagccatcaaaaccatattggcagaagtatgctaaaatgcgcgaaccaaaatgtgatatgggggttgcgatgttaaacggattaatatatgttataggtggaatcgttaaaggtgacacgtgtaccgacgcactagagagtttatcagaagatggatggatgaagcatcaacgtcttccaataaaaatgtccaatatgtcgacgattgttcatgatggcaagatttatatatctggaggttacaacaatagtagtgtagttaatgtaatatcgaatctagtccttagctataatccgatatatgatgaatggaccaaattatcatcattaaacattcctagaattaatcccgctctatggtcagcgcataataaattatatgtaggaggaggaatatctgatgatgttcgaactaatacatctgaaacatacgataaagaaaaagattgttggacattggataatggtcacgtgttaccacgcaattatataatgtataaatgcgaaccgattaaacataaatatccattggaaaaaacacagtacacgaatgattttctaaagtatttggaaagttttataggtagttgatagaacaaaatacataattttgtaaaaataaatcactttttatactaatatgacacgattaccaatacttttgttactaatatcattagtatacgctacaccttttcctcagacatctaaaaaaataggtgatgatgcaactctatcatgtaatcgaaataatacaaatgactacgttgttatgagtgcttggtataaggagcccaattccattattcttttagctgctaaaagcgacgtcttgtattttgataattataccaaggataaaatatcttacgactctccatacgatgatctagttacaactatcacaattaaatcattgactgctagagatgccggtacttatgtatgtgcattctttatgacatcgcctacaaatgacactgataaagtagattatgaagaatactccacagagttgattgtaaatacagatagtgaatcgactatagacataatactatctggatctacacattcaccagaaactagttctgagaaacctgattatatagataattctaattgctcgtcggtattcgaaatcgcgactccggaaccaattactgataatgtagaagatcatacagacaccgtcacatacactagtgatagcattaatacagtaagtgcaacatctggagaatccacaacagacgagactccggaaccaattactgataaagaagaagatcatacagtcacagacactgtctcatacactacagtaagtacatcatctggaattgtcactactaaatcaaccaccgatgatgcggatctttatgatacgtacaatgataatgatacagtaccatcaactactgtaggtagtagtacaacctctattagtaattataaaaccaaggactttgtagaaatatttggtattaccgcattaattatattgtcggccgtggcaatattctgtattacgtattatatatgtaataaacgttcacgtaaatacaaaacagagaacaaagtctagatttttgacttacataaatgtctgggatagtaaaatctatcatattgagcggaccatctggttcaggaaagacagccatagccaaaagactatgggaatatatttggatttgtggtgtcccataccactagatttcctcgtcctatggaacgagaaggtgtcgattaccattacgttaacagagaggccatctggaagggaatagccgccggaaactttctagaacatactgagtttttaggaaatatttacggaacttctaaaactgctgtgaatacagcggctattaataatcgtatttgtgtgatggatttaaacatcgacggtgttagaagttttaaaaatacttacctaatgccttactcggtgtatataagacctacctctcttaaaatggttgagaccaagcttcgttgtagaaacactgaagctaacgatgagattcatcgtcgcgtgatattggcaaaaacggatatggatgaggccaacgaagcaggtctattcgacactattattattgaagatgatgtgaatttagcatatagtaagttaattcagatactacaggaccgtattagaatgtattttaacactaattaaagacttaagacttaaaacttgataattaataatataactcgtttttatatgtggctatttcaacgtctaatgtattagttaaatattaaaacttaccacgtaaaacttaaaatttaaaatgatatttcattgacagatagatcacacattatgaactttcaaggacttgtgttaactgacaattgcaaaaatcaatgggtcgttggaccattaataggaaaaggtggatttggtagtatttatactactaatgacaataattatgtagtaaaaatagagcccaaagctaacggatcattatttaccgaacaggcattttatactagagtacttaaaccatccgttatcgaagaatggaaaaaatctcacaatataaagcacgtaggtcttatcacgtgcaaggcatttggtctatacaaatccattaatgtggaatatagattcttggtaattaatagattaggtgtagatctagatgcggtgatcagagccaataataatagattaccaaaaaggtcggtgatgttgatcggaatcgaaatcttaaataccatacaatttatgcacgagcaaggatattctcacggagatattaaagcgagtaatatagtcttggatcaaatagataagaataaattatatctagtggattacggattggtttctaaattcatgtctaatggcgaacatgttccatttataagaaatccaaataaaatggataacggtactctagaatttacacctatagattcgcataaaggatacgttgtatctagacgtggagatctagaaacacttggatattgtatgattagatggttgggaggtatcttgccatggactaagatatctgaaacaaagaattgtgcattagtaagtgccacaaaacagaaatatgttaacaatactgcgactttgttaatgaccagtttgcaatatgcacctagagaattgctgcaatatattaccatggtaaactctttgacatattttgaggaacccaattacgacgagtttcggcacatattaatgcagggtgtatattattaagtgtggtgtttggtcgatgtaaaatttttgtcgataaaaattaaaaaataacttaatttattattgatctcgtgtgtacaaccgaaatcatggcgatgttttacgcacacgctctcggtgggtacgacgagaatcttcatgcctttcctggaatatcatcgactgttgccaatgatgtcaggaaatattctgttgtgtcagtttataataacaagtatgacattgtaaaagacaaatatatgtggtgttacagtcaggtgaacaagagatatattggagcactgctgcctatgtttgagtgcaatgaatatctacaaattggagatccgatccatgatcaagaaggaaatcaaatctctatcatcacatatcgccacaaaaactactatgctctaagcggaatcgggtacgagagtctagacttgtgtttggaaggagtagggattcatcatcacgtacttgaaacaggaaacgctgtatatggaaaagttcaacatgattattctactatcaaagagaaggccaaagaaatgagtacacttagtccaggacctataattgattaccacgtctggataggagattgtatctgtcaagttactgctgtggacgtacatggaaaggaaattatgagaatgagattcaaaaagggtgcggtgcttccgatcccaaatctggtaaaagttaaacttggggagaatgatacagaaaatctttcttctactatatcggcggcaccatcgaggtaaccacctctctggaagacagcgtgaataatgtactcatgaaacgtttggaaactatacgccatatgtggtctgttgtatatgatcattttgatattgtgaatggtaaagaatgctgttatgtgcatacgcattcatctaatcaaaatcctataccgagtactgtaaaaacaaatttgtacatgaagactatgggatcatgcattcaaatggattccatggaagctctagagtatcttagcgaactgaaggaatcaggtggatggagtcccagaccagaaatgcaggaatttgaatatccagatggagtggaagacactgaatcaattgagagattggtagaggagttcttcaatagatcagaacttcaggctggtaaattagtcaaatttggtaattctattaattgttaaacatacatctgtttcagctaagcaactaagaacacgtatacggcagcagcttcctttatactctcatcttttaccaacacaaagggtggatatttgttcattggagttgataataatacacacaaagtatttggattcacggtgggttacgactacctcagactggtagagaatgatatagaaaagcatatcaaaagactttgtgttgtgcatttctgtgagaagaaagaggacatcaagtacgcgtgtcgattcatcaaggtatataaacctggggatgaggctacctcgacatacgtgtgcgctatcaaagtggaaagatgctgttgtgctgtgtttgcagattggccagaatcatggtatatggatactaatggtatcaagaagtattctccagatgaatgggtgtcacatataaaattttaattaatgtaactatagagaacaaataataggttgtaatatcatatagacaataactaacaattaattagtaactgttatctcttttttaactaaccaactaactatatacctattaatacatcgtaattatagttcttaacatctattaatcattgattcgcttctttaattttttataaactaacattgttaattgaaaagggataacatgttacagaatataaattatatatggatttttttaaaaaggaaatacttgactggagtgtatatttatctcttcattatatagcacgcgtgtgttccaattcttccacatcccatataatacaggattataatctcattcgaacatacgagaaagtggataaaacaatagttgattttttatctaggttgccaaatttattccatattttagaatatggggaaaatattctacatatttattctatggatgatgctaatacgaatattataattttttttctagatagagtattaaatattaataagaacgggtcatttatacacaatctcaggttatcatcatccattaatataaaagaatatgtatatcaattagttaataatgatcatccagataataggataagactaatgcttgaaaatggacgtagaacaagacattttttgtcctatatatcagatacagttaatatctatatatgtattttaataaatcatggattttatatagatgccgaagacagttacggttgtacattattacatagatgtatatatcactataagaaatcagaatcagaatcatacaatgaattaattaagatattgttaaataatggatcagatgtagataaaaaagatacgtacggaaacacaccttttatcctattatgtaaacacgatatcaacaacgtggaattgtttgagatatgtttagagaatgctaatatagactctgtagactttaatagatatacacctcttcattatgtctcatgtcgtaataaatatgattttgtaaagttattaatttctaaaggagcaaatgttaatgcgcgtaataaattcggaactactccattttattgtggaattatacacggtatctcgcttataaaactatatttggaatcagacacagagttagaaatagataatgaacatatagttcgtcatttaataatttttgatgctgttgaatctttagattatctattatccagaggagttattgatattaactatcgtactatatacaacgaaacatctatttacgacgctgtcagttataatgcgtataatacgttggtctatctattaaacagaaatggtgattttgagacgattactactagtggatgtacatgtatttcggaagcagtcgcaaacaacaacaaaataataatggaagtactattgtctaaacgaccatctttgaaaattatgatacagtctatgatagcaattactaaaaataaacaacataatgcagatttattgaaaatgtgtataaaatatactgcgtgtatgaccgattatgatactcttatagatgtacagtcgctacagcaatataaatggtatattttaaaatgtttcgatgaaatagatatcatgaagagatgttatataaaaaataaaactgtattccaattagttttttgtatcaaagacattaatactttaatgagatacggtaaacatccttctttcgtgaagtgcactagtctcgacgtatacggaagtcgtgtacgtaatatcatagcatctattagatatcgtcagagattaattagtctattatccaagaagctggatgcgggagataaatggtcgtgttttcctaacgaaataaaatataaaatattggaaaactttaacgataacgaactgtccacatatctaaaaatcttataaacactattaaaatataaaatctaagtaggataaaatcacactacatcattgtttccttttagtgctcgacagtgtatactatttttaacactcataaataaaaatgaaaacgatttccgttgttacgttgttatgcgtactacctgctgttgtttattcaacatgtactgtacccactatgaataacgctaaattaacgtctaccgaaacatcgtttaataataaccagaaagttacgtttacatgtgatcagggatatcattcttcggatccaaatgctgtctgcgaaacagataaatggaaatacgaaaatccatgcaaaaaaatgtgcacagtttctgattacatctctgaactatataataaaccgctatacgaagtgaattccaccatgacactaagttgcaacggcgaaacaaaatattttcgttgcgaagaaaaaaatggaaatacttcttggaatgatactgttacgtgtcctaatgcggaatgtcaacctcttcaattagaacacggatcgtgtcaaccagttaaagaaaaatactcatttggggaatatatgactatcaactgtgatgttggatatgaggttattggtgcttcgtacataagttgtacagctaattcttggaatgttattccatcatgtcaacaaaaatgtgatataccgtctctatctaatggattaatttccggatctacattttctatcggtggcgttatacatcttagttgtaaaagtggttttatactaacgggatctccatcatccacatgtatcgacggtaaatggaatcccgtactcccaatatgtgtacgaactaacgaagaatttgatccagtggatgatggtcccgacgatgagacagatttgagcaaactctcgaaagacgttgtacaatatgaacaagaaatagaatcgttagaagcaacttatcatataatcatagtggcgttaacaattatgggcgtcatatttttaatctccgttatagtattagtttgttcctgtgacaaaaataatgaccaatataagttccataaattgctaccgtaaatataaatccgttaaaataattaataattaataattaataattaataacgaacaagtatcaaaagattaaagacttatagctagaatcaattgagatgtcttcttcagtggatgttgatatctacgatgccgttagagcatttttactcaggcactattataacaagagatttattgtgtatggaagaagtaacgccatattacataatatatacaggctatttacaagatgcgccgttataccgttcgatgatatagtacgtactatgccaaatgaatcacgtgttaaacaatgggtgatggatacacttaatggtataatgatgaatgaacgcgatgtttctgtaagcgttggcaccggaatactattcatggaaatgtttttcgattacaataaaaatagtatcaacaatcaactaatgtatgatataattaatagcgtatctataattctagctaatgagagatatagaagcgcttttaacgacgatggtatatacatccgtagaaatatgattaacaagttgtacggatacgcatctctaactactattggcacgatcgctggaggtgtttgttattatctgttgatgcatctagttagtttgtataaataattatttcaatatactagttaaaattttaagattttaaatgtataaaaaactaataacgtttttatttgtaataggtgcattagcatcctattcgaataatgagtacactccgtttaataaactgagtgtaaaactctatatagatggagtagataatatagaaaattcatatactgatgataataatgaattggtgttaaattttaaagagtacacaatttctattattacagagtcatgcgacgtcggatttgattccatagatatagatgttataaacgactataaaattattgatatgtataccattgactcgtctactattcaacgcagaggtcacacgtgtagaatatctaccaaattatcatgccattatgataagtacccttatattcacaaatatgatggtgatgagcgacaatattctattactgcagagggaaaatgctataaaggaataaaatatgaaataagtatgatcaacgatgatactctattgagaaaacatactcttaaaattggatctacttatatatttgatcgtcatggacatagtaatacatattattcaaaatatgatttttaaaaatttaaaatatattatcacttcagtgacagtagtcaaataacaaacaacaccatgagatatattataattctcgcagttttgttcattaatagtatacacgctaaaataactagttataagtttgaatccgtcaattttgattccaaaattgaatggactggggatggtctatacaatatatcccttaaaaattatggcatcaagacgtggcaaacaatgtatacaaatgtaccagaaggaacatacgacatatccgcatttccaaagaatgatttcgtatctttctgggttaaatttgaacaaggcgattataaagtggaagagtattgtacgggactatgcgtcgaagtaaaaattggaccaccgactgtaacattgactgaatacgacgaccatatcaatttgtacatcgagcatccgtatgctactagaggtagcaaaaagattcctatttacaaacgcggtgacatgtgtgatatctacttgttgtatacggctaacttcacattcggagattctgaagaaccagtaacatatgatatcgatgactacgattgcacgtctacaggttgcagcatagactttgccacaacagaaaaagtgtgcgtgacagcacagggagccacagaagggtttctcgaaaaaattactccatggagttcggaagtatgtctgacacctaaaaagaatgtatatacatgtgcaattagatccaaagaagatgttcccaatttcaaggacaaaatggccagagttatcaagagaaaatttaataaacagtctcaatcttatttaactaaatttctcggtagcacatcaaatgatgttaccacttttcttagcatgcttaacttgactaaatattcataactaatttttattaatgatacaaaaacgaaataaaactgcatattatacactggttaacgcccttataggctctaaccattttcaagatgaggtccctgattatagtccttctgttcccctctatcatctactccatgtctattagacgatgtgagaagactgaagaggaaacatggggattgaaaatagggttgtgtataattgccaaagatttctatcccgaaagaactgattgcagtgttcatctcccaactgcaagtgaaggattgataactgaaggcaatggattcagggatatacgaaacaccgataaattataaaaaaagcaatgtgtccgctgtttccgttaataatactattttcgtaactggcggattattcataaataactctaatagcacgatcgtggttaacaatatggaaaaacttgacatttataaagacaaacaatggtcgattatagaaatgcctatggctagggtatatcacggcatcgactcgacatttggaatgttatattttgccggaggtctatccgttaccgaacaatatggtaatttagagaaaaacaacgagatatcttgttacaatcctagaacgaataagtggtttgatatttcatatactatttataagatatccatatcatcattgtgtaaactaaataacgtcttctatgtatttagtaaggacattggatatgtggaaaagtatgatggtgcatggaagttagtacatgatcgtctccccgctataaaggcattatcaacttctccttattgattgaaaatgaaaatataaatagtttttatgtatagcagtattaccctatagttttattgcttactactaacatggatacagatacagatacagatacagatacagatacagatacagatacagatacagatgttacaaatgtagaagatatcataaatgaaatagatagagagaaagaagaaatactaaaaaatgtagaaattgaaaataataaaaacattaacaagaatcatccaagtggatatattagagaagcactcgttattaatacaagtagtaatagtgattccattgataaagaagttatagaatgtatcagtcacgatgtaggaatatagatcatatctactaatttttataatcaatacaaaacataaaaaacaactcgttattacatagcaggcatggaatccttcaagtattgttttgataacgatggcaagaaatggattatcggaaatactttatattctggtaattcaatactctataaggtcagaaaaaatttcactagttcgttctacaattacgtaatgaagatagatcacaaatcacacaagccattgttgtctgaaatacgattctatatatctgtattggatcctttgactatcgacaactggacacgggaacgtggtataaagtatttggctattccagatctgtatggaattggagaaaccgatgattatatgttcttcgttataaagaatttgggaagagtattcgccccaaaggatactgaatcagtcttcgaagcatgtgtcactatgataaacacgttagagtttatacactctcgaggatttacccatggaaaaatagaaccgaggaatatactgattagaaataaacgtctttcactaattgactattctagaactaacaaactatacaagagtggaaactcacatatagattacaacgaggacatgataacttcaggaaatatcaattatatgtgtgtagacaatcatcttggagcaacagtttcaagacgaggagatttagaaatgttgggatattgcatgatagaatggttcggtggcaaacttccatggaaaaacgaaagtagtataaaagtaataaaacaaaaaaaagaatataaaaaatttatagctactttctttgaggactgttttcctgaaggaaatgaacctctggaattagttagatatatagaattagtatacacgttagattattctcaaactcctaattatgacagactacgtagactgtttatacaagattgaaattatattctttttttatagagtgtggtagtgttacggatatctaatattaatattagactatctctatcgcgctacacgaccaatatcgattactatgaatatcttctatgaaaggagagaatgtattcatttctccagcgtcaatctcgtcagtattgacaatactgtattatggagctaatggatccactgctgaacagctatcaaaatatgtagaaacggaggagaacacggataaggttagcgctcagaatatctcattcaaatccataaataaagtatatgggcgatattctgccgtgtttaaagatttctttttgggaaaaattggcgataagtttcaaactgttgacttcactgattgtcgcactatagatgcaatcaacaagtgtgtagatatctttactgaggggaaaatcaatccactattggatgaaccattgtctcctagcaattagtgccgtatactttaaagcaaaatggttgacgccattcgaaaaggaatttaccagtgattatcccttttacgtatcaccaacggaaatggtagatgtaagtatgatgtctatgtacggcgagctatttaatcacgcatctgtaaaggaatcattcggcaacttttcaatcatagaactgccatatgttggagatactagtatgatggtcattcttccagacaagattgatggattagaatccatagaacaaaatctaacagatacaaattttaagaaatggtgtaactctctggatgctatgtttatagatgttcacattcccaagtttaaggtaacaggctcgtataatctggtggatactctagtaaagtcaggactgacagaggtgttcggttcaactggagattatagcaatatgtgtaatttagatgtgagtgtcgacgctatgatccacaaaacgtatatagatgtcaatgaagagtatacagaagcagctgcagcaacttgtgcactggtgtcagactgtgcatcaacaattacaaatgagttctgtgtagatcatccgttcatctatgtgattaggcatgttgatggaaaaattcttttcgttggtagatattgctctccaacaactaattgttaaccattttttttaaaaaaaatagaaaaaacatgtggtattagtgcaggtcgttgttcttccaattgcaattggtaagatgacagccaactttagtacccacgtcttttcaccacagcactgtggatgtgacagactgaccagtattgatgacgtcaaacaatgtttgactgaatatatttattggtcgtcctatgcataccgcaacaggcaatgcgctggacagttgtattccacactcctctcttttagagatgatgcggaattagtgttcatcgacattcgcgagctggtaaaaaatatgccgtgggatgatgtcaaagattgtacagaaatcatccgttgttatataccggatgagcaaaaaaccatcagagagatttcggccatcatcggactttgtgcatatgctgctacttactggggaggtgaagaccatcccactagtaacagtctgaacgcattgtttgtgatgcttgagatgctcaattacgtggattataacatcatattccggcgtatgaattgatgagttgtacatcttgacattttcttctttcttctcttctccctttcccagaaacaaacttttttacccactataaaataaaatgagtatactacctgttatatttcttcctatatttttttattcttcattcgttcagacttttaacgcgtctgaatgtatcgacaaagggtaatattttgcatcattcatggagttagaaaacgagccagtaatcttaccatgtcctcaaataaatacgctatcatccggatataatatattagatattttatgggaaaaacgaggagcggataatgatagaattataccgatagataatggtagcaatatgctaattctgaacccgacacaatcagactctggtatttatatatgcattaccacgaacgaaacctactgtgacatgatgtcgttaaatttgacaatcgtgtctgtctcagaatcaaatatagattttatctcgtatccacaaatagtaaatgagagatctactggcgaaatggtatgtcccaatattaatgcatttattgctagtaacgtaaacgcagatattatatggagcggacatcgacgccttagaaataagagacttaaacaacggacacctggaattattaccatagaagatgttagaaaaaatgatgctggttattatacatgtgttttagaatatatatacggtggcaaaacatataacgtaaccagaattgtaaaattagaggtacgggataaaataatacatcctactatgcaattaccagaaggtgttgtaacttcaataggtagtaatttgactattgcgtgtagagtatcgttgagacctcccacaacggatgcagacgtcttttggataagtaatggtatgtattacgaagaagatgatggggacggagacggtagaataagtgtagcaaataaaatctatatgaccgataagagacgtgttattacatcccggttaaacattaatcctgtcaaggaagaagatgctacaacgtttacgtgtatggcgtttactattcctagcatcagcaaaacagttactgttagtataacgtgaatgtatgttgttacatttccatgtcaattgagtttataagaatttttatacattatcttccaacaagcaattgacgaacgtattgctatgattaactcccacgatactatgcatattattaatcattaacttgcagactatacctagagctattttgacatactcgtgttcttgtgtaattgcagtatctatattattaaagtacgtaaatctagctatagttttattatttaattttagataatataccgtctccttatttttaaaaattgccacatcctttattaaatcatgaatgggaatttctatgtcatcgttagtatattgtgaacaacaagagcagatatctataggaaagggtggaatgcgatacattgatctatgtagttttaaaacacacgcaaactttgaagaatttatataaatcattccatcgatacatccttctatgttgacatgtatatatccaggaattcttttattaatgtcaggaaatgtataaactaaaacattgcccggaagcggagcttctaccggagttatatccgttcttaacttacaaaatgtaaccaatacctttgcatgacttgttttgttcggcaacgttagtttaaacttgacgaatggattaattacaatagcatgatccgcgcatctattaagtttttttactttaacgcccttgtatgtttttacagagactttatctaaatttctagtacttgtatgtgttataaatataacgggatatagaaccgaatcacctaccttagatacccaattacattttatcagatccagataataaacaaattttgtcgccctaactaattctatattgttatatattttacaattggttatgatatcatgtaataacttggaatctaacgcacatcgtcgtacgtttacacaattgtgatttagtgtagtatatctacacatgtatttttccgcgctatagtattctggactagtgataaaactatcgttatatctgtcttcaatgaactcatcgagatattgctctctgtcatattcatacacctgcataaactttctagacatcttacaatccgtgttattttaggatcatatttacatatttactggtataaagatgttagattagttaatgggaatcgtctataataatgaatattaaacaattatatgaggacttttaccacaaagcatcataaaaatgagtcgtcgtctgatttatgttttaaatatcaaccgcaaatcaactcataaaatacaagagaatgaaatatatacatattttagtcattgcaatatagaccatacttctacagaacttgattttgtagttaaaaactatgatctaaacagacgacaacatgtaactgggtatactgcactacactgctatttgtataataattactttacaaacgatgtactgaagatattattaaatcatgacgtaaatgtaacgatgaaaaccagtagcggacgtatgcctgtttatatattgcttactagatgttgtaatatttcacatgatgtagtgatagatatgatagacaaagataaaaaccacttatcgcatagagactattccaacctactactagagtatataaaatctcgttacatgttattgaaggaagaggatatcgatgagaacatagtatcaactttattagataagggaatcgatcctaactttaaacaagacggatatacagcgttacattattattatttgtgtctcgcacacgtttataaaccaggtgagtgtagaaaaccgataacgataaaaaaggccaagcgaattatttctttgtttatacaacatggagctaatctaaacgcgttagataattgtggtaatacaccattccatttgtatcttagtattgaaatgtgtaataatattcatatgactaaaatgctgttgacttttaatccgaatttcaaaatatgtaataatcatggattaacgcctatactatgttatataacttccgactacatacaacacgatattcttgttatgttaatacatcactatgaaacaaatgttggagaaatgccgatagatgagcgtcgtatgatcgtattcgagtttatcaaaacatattctacacgtcctgcagattcgataacttatttgatgaataggtttaaaaatataaatatttatacccgctatgaaggaaagacattattacacgtagcatgtgaatataataatacacaagtaatagattatcttatacgtatcaacggagatataaatgcgttaaccgacaataacaaacacgctacacaactcattatagataacaaagaaaattccccatataccattaattgtttactgtatatacttagatatattgtagataagaatgtgataagatcgttggtggatcaacttccatctctacctatcttcgatataaaatcatttgagaaattcatatcctactgtatacttttagatgacacattttacgataggcacgttaagaatcgcgattctaaaacgtatcgatacgcattttcaaaatacatgtcgttcgataaatacgatggtataataactaaatgtcacgacgaaacaatgttactcaaactgtccactgttctagacactacactatatgcagttttaagatgtcataattcgagaaagttaagaagatacctcaccgagttaaaaaaatataataacgataagtcctttaaaatatattctaatattatgaatgagagataccttaatgtatattataaagatatgtacgtgtcaaaggtatatgataaactatttcctgttttcacagataaaaattgtctactaacattactaccttcagaaattatatacgaaatattatacatgctgacaattaacgatctttataatatatcgtatccacctaccaaagtatagttgtatttttctcatgcgatgtgtgtaaaaaaactgatattatataaatattttagtgccgtataataaagatgacgatgaaaatgatggtacatatatatttcgtatcattatcattattgttattgctattccacagttacgccatagacatcgaaaatgaaatcacagaattcttcaataaaatgagagatactctaccagctaaagactctaaatggttgaatccagcatgtatgttcggaggcacaatgaatgatatggccactctaggagagccattcagtgcaaagtgtcctcctattgaagacagtcttttatcgcacagatataaagactatgtggttaaatgggagaggctagaaaagaatagacggcgacaggtttctaataaacgtgttaaacatggtgatttatggatagccaactatacatctaaattcagtaaccgtaggtatttgtgcaccgtaactacaaagaatggtgactgtgttcagggtatagttagatctcatattaaaaaacctccttcatgcattccaaaaacatatgaactaggtactcatgataagtatggcatagacttatactgtggaattctttacgcaaaacattataataatataacttggtataaagataataaggaaattaatatcgacgacattaagtattcacaaacgggaaaggaattaattattcataatccagagttagaagatagcggaagatacgactgttacgttcattacgacgacgttagaatcaagaatgatatcgtagtatcaagatgtaaaatacttacggttataccgtcacaagaccacaggtttaaactaatactagatccgaaaatcaacgtaacgataggagaacctgccaatataacatgcactgctgtgtcaacgtcattattgattgacgatgtactgattgaatgggaaaatccatccggatggcttataggattcgattttgatgtatactctgttttaactagtagaggcggtatcaccgaggcgaccttgtactttgaaaatgttactgaagaatatataggtaatacatataaatgtcgtggacacaactattattttgaaaaaacccttacaactacagtagtattggagtaaatatacaatgcatttttatatacattactgaattattattactgaattattattactgaattattattaattatatcgtatttgtgctatagaatggatgaagatacgcgactatctaggtatttgtatctcaccgatagagaacatataaatgtagactctattaaacagttgtgtaaaatatcagatcctaatgcatgttatagatgtggatgtacggctttacatgagtacttttataattatagatcagtcaacggaaaatacaagtatagatacaacggttactatcaatattattcatctagcgattatgaaaattataatgaatattattatgatgattatgatagaactggtatgaacagcgagagcgatagtgagagtgataatatatcaatcaaaacagaatatgagaatgaatatgaattctatgatgaaacacaagatcaaagtacacaacacaatgacttataaaaatactaaaactggagagactgattacacgtacctctctaatgggggttgcctgcatactatcgtaatggggtcgatggttgattattgattagtatattccttattcacacaaaaagaacatttttataaacatgaaaccactgtctaaatgtaattatgatcttgatttatagatgaagatcagcctttagaggattttaaccagtatgtttaatatgaaaaaaataaacataacatattttgagattaagcgctattgtgcttaattattttgctctataaactgaatatatagccacaattattgacgggcttgtttatgaccggcaatcatgaatttacagaaattatctctggctatatatcttactgcgacatgttcgtggtgttatgaaacatgcataagaaaaactgcgttgtatcatgacattcaattggagcatgtagaagacaataaagatagtgtagcgtcgctaccgtacaagtagtcaatcaaagagaacgtagtagattgttggctacatttaattggacagatatagctgagggtgttagaaatgagttcattaaaatatgtgatatcaacggaacatatttatataattatactattgctgttagtataattattgattccacggaagaactaccaacagttactccaattacaacaacatatgaaccttctacatataattatactatcgatgatagcactgttattactactgaagaactacaagtgactcctcatatggatctccatcgatgatacatgtattaaaatactttccgaataagtcttttaaatattgtattaattatgaaaaactatgctatgcgagtatgatgcaaagatgtttaatgatacgatactagattttatctctagcgagagatgtcgttagaatcatttatcataactacgtttaataataattcatcaacgaatatcgataacatgtgtcatttatacgttaaagtctgtccgtcttctctattgtttagactgtttgtagaatgctgtgatataaacaaactagtagaaggtacgactccgttacactgttatctaatgaatgaaggatttgaatcatctgttttaaaaaacctattaaaggagtatgtcatgaatacgtttaatgttcatgacatccattacacaaatatttaactcatgatgaagttgagaatgatatgctttctgatagtatagatagctttagctaatataaaaatatattaatccactatatattctagacttgatttaaaaccgataaactactactacgtactgtataagttgttaaaaaaaggagcagaccctaattatgtagatgatagaggtaatacttttcttcattacttctgcatctatatgtccacttatgagaaaacgtcattcaataagatgcatcgtgaaaagaaatttattaaagagttggtaaaatatgaaaccgaaagtaaataatataggaaatacacctctacataactacgtatctcaatatgatatcactctcattcctcatccacaacccattaaaaaaatggaaattaaagccctctattagcataaacggctacaggtctacctttacaatggcctttccttgtgcccagttcagaccctgtcattgccacgctactaaggactccctgaataccgtggccgacgtcagacattgtctgactgaatacatcctgtgggtttctcatagatggacccatagagaaagcgcagggtctctctacaggcttctcatctctttcagaactgatgcaacggagctctttggtggtgagttgaaggattcacttccgtgggacaatatcgacaattgcgtggagatcattaaatgtttcatcagaaatgactccatgaaaaccgccgaagaacttcgtgcaatcattggactttgtactcaatcagctatcgtctctggaagagtcttcaacgataagtatatcgacatactacttatgctgcgaaagattctgaacgagaacgactatctcaccctcttggatcatatccgcactgctaaatactaaatctccttcatgctctctcactacactttttatcatcttatgaggaatgattgccttcatcatttttcgtgaaataggaataattagcaccagaatagctatggattattgtggtagagagtgcactattctatgtcgtctactggatgaagatgtgacgtacaaaaaaataaaactagagattgaaacgtgtcacaacttatcaaaacatatagatagacgaggaaacaatgcgctacattgttacgtctccaataaatgcgatacagacattaagattgttcgactgttactctctcgcggagtcgagagactttgtagaaacaacgaaggattaactccgctaggagcatacagtaagcatagatacgtaaaatctcagattgtgcatctactgatatccagctattcgaattcctctaacgaactcaagtcgaatataaatgatttcgatctgtcttcggataatatcgacttacgtctgctaaaatacctaattgtggataaacggatacgtccgtccaagaatacgaattatgcaatcaatggtctcggattggtggatatatacgtaacgacgcctaatccgagaccagaagtattgctatggcttcttaaatcagaatgttacagcaccggttacgtatttcgtacctgtatgtacaacagtgatatgtgtaagaactctcttcattactatatatcgtctcatagagaatctcaatctctatccaaggatgtaattaaatgtttgatcaataacaatgtttccatccatggcagagacgaaggaggatctttacccatccaatactactggtctttctcaaccatagatatagagattgttaaattattattaataaaggatgtggacacgtgtagagtatacgacgtcagccctatattagaggcgtattatctaaacaagcgatttagagtaaccccatataatgtagacatggaaatcgttaatcttcttattgagagacgtcatactcttgtcgacgtaatgcgtagtattacttcgtacgattccagagaatataaccactacatcatcgataacattctaaagagatttagacaacaggatgaatccatcgtacaagccatgttgataaactacttacattacggcgatatggtcgttcgatgcatgttagataacggacaacaactatcctctgcacgactactttgttaataataatctcgtcgatgtaaacgtcgtaaggtttatcgtggaaaatatggacacgcggctgtaaatcacatatctaacaatggccgtctatgtatgtacggtctgatattatcgagatttaataattgcgggtatcactgttatgaaaccatactaatagatgtatttgatatactaagcaagtacatggatgatatagatatgatcgataatgagaataaaactctactatattacgcggtcgatgtcaataatatacaatttgcaaagcggttattggaatatggagcgagtgttacaacatcacgctcgataatcaatacggccatccagaaaagcagttaccaaagagaaaacaaaacgaggatagttgatttattacttagctaccatcccactctagagactatgattgacgcatttaatagagatatacgctatctatatcctgaaccattattcgcctgtatcagatacgccttaatcctagatgatgattttccttctaaagtaagtatgatatcgccggtcatcataaggaactaaagcgctatagagtagacattaatagaatgaagaatgcctacatatcaggcgtctccatgtttgatatattatttaaacgaagcaaacgccacagactgagatacgcaaagaatccgacatcaaatggtacaaaaaagaactaacgtccatcattacagaaactgtaaagaacagtgagaggatcgactccatagtggacaacattaatacagacgataacttgatttcgaaattacccatggagatactttattactccattaaataatttatcatggagtgataatgtcctgtttcatttgtttccatgacatattacaaaatcgattccgtccaagatgataaaaacatttaccggcatcataaacacggagtttattttatatgtctcgcataaacattactaaaaaaatatattgttctgtttttctttttctttttctttttctttcgtacatctctaattatgaaaaagtaaatgatgaaatgtatgagatgggcgagatggacgagattgtgagcatcgttcgcgacagtatgtggtacatacctaacgtatttatggacgacggtaagaatgaaggtcacgtttctgtcaacaatgtttgtcatatgtattttacgttctttgatgtggatacatcgtctcatctgtttaagctagttattaaacactgcgatctgaataaacgaggtaactctccattacattgctatacgatgaatacacgatttaatccatctgtattaaagatattgttacaccacggcatgcgtaactttgatagcaaggatgaaaaaggacaccactatctgattcattcactatcaatcgataacaagatctttgatatactaacggacaccattgatgactttagtaaatcatccgatctattgctgtgttatcttagatataaattcaatgggagcttaaactactacgttctgtacaaaggatccgaccctaattgcgccgacgaggatgaactcacttctcttcattactactgtaaacacatatccacgttctacaaaagcaattattacaagttaagtcacactaagatgcgagccgagaagcgattcatctacgcgataatagattatggagcaaacattaacgcggttacacacttaccttcaacagtataccaaacatagtcctcgtgtggtgtatgctcttttatctcgaggatacgtaataatcttgattgtacacccatcatggaacgattgtgcaacaggtcatattctcataatgttactcaattggcacgaacaaaaggaagaaggacaacatctactttatctattcataaaacataatcaaggatacactctcaatatactacggtatctactagataggttcgacattcagaaagacgaatacatataccgcctttcaaaattgtaacaacaatgttgcctcatacatcggatacgacatcaaccttccgactaaagacggtattcgacttggtgtttgaaaacagaaacatcatatacaaggcggatgttgtgaatgacatcatccaccacagactgaaagtatctctacctatgattaaatcgttgttctacaagatgtcagaattctctccctacgacgattactacgtaaaaaagatactagcctactgcctattaagggacgagtcattcgcggaactacatagtaaattctgtttaaacgaggactataaaagtgtatttatgaaaaatatatcattcgataagatagattccatcatcgtgacataagtcgcctcaaagagattcgaatctccgacaccgacctgtatacggtatcacagctatcttgaagccatacattcggacagacacatttcatttcccatgtacgacgatctcatagaacagtgccatctatcgatggagcgtaaaagtaaactcgtcgacaaagcactcaataaattagagtctaccatcggtcaatctagactatcgtatttgcctccggaaattatgcgcaatatcatctaaacagtatgttgtacggaaagaaccattacaaatattatccatgatagaaagaaaatatctatatgattggagaagtaggaaacaggaacacgacaacgattactacattattaaattatgaagtccgtattatactcgtatatattgtttctctcatgtataataataaacggaagagatatagcaccgcatgcaccatccgatggaaagtgtaaagacaacgaatacaaacgccataatttgtgtccgggaacatacgcttccagattatgcgatagcaagactaacacacaatgtacgccgtgtggttcgggtaccttcacatctcgcaataatcatttacccgcttgtctaagttgtaacggaagacgcgatcgtgtaacactactcacaatagaatctgtgaatgctctcccggatattattgtcttctcaaaggatcatccggatgcaaggcatgtgtttcccaaacaaaatgtggaataggatacggagtatccggagacgtcatctgttctccgtgtggtctcggaacatattctcacaccgtctcttccgcagataaatgcgaacccgtacccagaaatacctttaactatatcgatgtggaaattaatctgtatcccgtcaacgacacgtcgtgtactcggacgaccactaccggtctcagtgaatccatctcaacgtcggaactaactattactatgaatcataaagactgtaatcccgtatttcgtgatggatacttctccgttcttaataaggtagcgacttcaggattctttacaggagaaaggtgtgcactctgaatttcgagattaaatgcaataacaaagattcttcctccaaacagttaacgaaagcaaagaatgatgacggtatcatgccgcattcggagactgtatatctagcgtcgacatctatatactatatagtaataccaatactcaagactacgaaactgatacaatctcttatcatgtgggtaatgttctcgatgtcgatagccatatgcccggtagttgcgatatacataaactgatcactaattccaaacccacccgctttttatagtaagtttttcacccataaataataaatacaataattaatttctcgtaaaagtagaaaatatattctaatttattgcatggtaaggaagtagaatcataaagaacagtactcaatcaatagcaattatgaaacaatatatcgtcctggcatgcatgtgcctgccagtcttcagcaatcatcctcatcctcctcctcgtgtacggaagaagaaaacaaacatcatatgggaatcgatgttattatcaaagtcacaaagcaagaccaaacaccgaccaatgataagatttgccaatccgtaacggaaattacagagtccgagtcagatccagatcccgaggtggaatcagaagatgattccacatcagtcgaggatgtagatcctcctaccacttattactccatcatcggtggaggtctgagaatgaactttggattcaccaaatgtcctcagattaaatccatctcagaatccgctgatggaaacacagtgaatgctagattgtccagcgtgtccccaggacaaggtaaggactctcccgcgatcactcgtgaagaagctctggctatgatcaaagactgtgaggtgtctatcgacatcagatgtagcgaagaagagaaagacagcgacatcaagacccatccagtactcgggtctaacatctctcataagaaagtgagttacgaagatatcatcggttcaacgatcgtcgatacaaaatgtgtcaagaatctagagtttagcgttcgtatcggagacatgtgcaaggaatcatctgaacttgaggtcaaggatggattcaagtatgtcgacggatcggcatctgaaggtgcaaccgatgatacttcactcatcgattcaacaaaactcaaagcgtgtgtctgaatcgataactctattcatctgaaattggatgagtagggttaatcgaacgattcaggcacaccacgaattaaaaaagtgtaccggacactatattccggtttgcaaaacaaaaatgttcttaactacattcacaaaaagttacctctcgttacttcttctttttctgtctcaatagtgtgatacgattatgacactattcctattcctattcctatttcctttcagggtatcacaaaaatattaaacctctttctgatggtctcataaaaaaagttttacaaaaatatttttattctctttctctctttgatggtctcataaaaaaagttttacaaaaatatttttattctctttctctctttgatggtctcataaaaaaagttttacaaaaatatttttattctctttctctctttgatggtctcataaaaaaagttttacaaaaatatttttattctctttctctctttgatggtctcataaaaaaagttttacaaaaatatttttattctctttctctctttgatggtctcataaaaaaagttttacaaaaatatttttattctctttctctctttgatggtctcataaaaaaagttttacaaaaatatttttattctctttctctcttcgatggtctcacaaaaaaagttttacaaaaatatttttattctctttctctctttgatggtctcataaaaaaagttttacaaaaatatttttattctctttctctctttgatggtctcataaaaaatattaaacctctttctgatggtgtcactaaaatatttttattctcattctcattttctctttctctcttcaatggagtcataaaatatttttattctctttctctcttcgatggtctcacaaaaatattaaacctctttctgatggtgtcactaaaatatttttattctcattctcattttctctttctctcttcaatggagtcataaaatatttttattctctttctctcttcgatggtctcacaaaaatattaaacctctttctgatggagtcgtaaaaaagttttatctctttctctcttcgatggtctcactaaaatattttttattctctttctgatgcatcaactatttcttaaacaataacgtccaacaacatatactcgtcgagcttatcaacatcccctatgcccatctaggttaccagacaattgtatatcataaaataatgtttataatttacacgttaaaatcatataataaaacgtagatcgtataatattttttggtatataaatgatctagtaaaatccatgtaggggatactgctcacattttttctttggtacaaaatttcacacaagtttttatacagacaaattcttgtccatatattttaaaacattgacttttgtactaagaaaaatatctagactaactatctctttctctttctctcttcgatggtctcacaaaaatattaaacctctttctgatggagtcgtaaaaaagttttatctctttctctcttcgatggtctcacaaaaatattaaacctctttctgatggagtcgtaaaaaagttttatctctttctctcttcgatggtctcacaaaaatattaaacctctttctgatggagtcgtaaaaaagttttatctttctctcttcgatggtctcacaaaaatattaaacctctttctgatggagtcgtaaaaaagttttatctctttctctcttcgatggtctcacaaaaatattaaacctctttctgatggagtcgtaaaaaagttttatctctttctctcttcgatggtctcacaaaaatattaaacctctttctgatggagtcgtaaaaaagttttatctctttctctcttcgatggtctcacaaaaatattaaacctctttctgatggagtcgtaaaaaagttttatctctttctctcttcgatggtctcacaaaaatattaaacctctttctgatggagtcgtaaaaaagttttatctctttctctcttcgatggtctcacaaaaatattaaacctctttctgatggagtcgtaaaaaagttttatctctttctctcttcgatggtctcacaaaaatattaaacctctttctgatggagtcgtaaaaaagttttatctctttctctcttcgatggtctcacaaaaatattaaacctctttctgatggagtcgtaaaaaagttttatctctttctctcttcgatggtctcacaaaaatattaaacctctttctgatggagtcgtaaaaaagttttatctctttctctcttcgatggtctcacaaaaatattaaacctctttctgatggagtcgtaaaaaagttttatctctttctctcttcgatggtctcacaaaaatattaaacctctttctgatggagtcgtaaaaaagttttatctctttctctcttcgatggtctcacaaaaatattaaacctctttctgatggagtcgtaaaaaagttttatctctttctctcttcgatggtctcacaaaaatattaaacctctttctgatggagtcgtaaaaaagttttatctctttctctcttcgatggtctcacaaaaatattaaacctctttctgatggagtcgtaaaaaagttttatctctttctctcttcgatggtctcacaaaaatattaaacctctttctgatggagtcgtaaaaaagttttatctctttctctcttcgatggtctcacaaaaatattaaacctctttctgatggagtcgtaaaaaagttttatctctttctctcttcgatggtctcacaaaaatattaaacctctttctgatggagtcgtaaaaaagttttatctctttctctcttcgatggtctcacaaaaatattaaacctctttctgatggagtcgtaaaaaagttttatctctttctctcttcgatggtctcacaaaaatattaaacctctttctgatggagtcgtaaaaaagttttatctctttctctcttcgatggtctcacaaaaatattaaacctctttctgatggagtagtcgtaaaaaagttttatctctttctctcttcgatggtctcacaaaaatattaaacctctttctgatggagtcgtaaaaaagttttatctctttctctcttcgatggtctcacaaaaatattaaacctctttctgatggagtcgtaaaaaagttttatctctttctctcttcgatggtctcacaaaaatattaaacctctttctgatggagtcgtaaaaaagttttatctctttctctcttcgatggtctcacaaaaatattaaacctctttctgatggagtcgtaaaaaagttttatctctttctccttcgatggtctcacaaaaatattaaacctctttctgatggagtcgtaaaaaagttttatctctttctccttcgatggtctcacaaaaatattaaacctctttctgatggagtcgtaaaaaagttttatctctttctcctttctcacaaaaatattaaacctctttctgatggagtcgtaaaaaagttttatctctttctcctttctcacaaaaatattaaacctctttctgatggagtctccttcgatggtctcacaaaaatattaaacctctttctgatggagtcgtaaaaaagttttatctctttctccttcgatggtctcacaaaaatattaaacctctttctgatggagtcgtaaaaaagttttatctctttctccttcgatggtctcacaaaaatattaaacctctttctgatggagtcgtaaaaaagttttatctctttctccttcgatggtctcacaaaaatattaaacctctttctgatggagtcgtaaaaaagttttatctctttctcctttctcacaaaaatattaaacctctttctgatggagtcgtaaaaaagttttatctctttctccttcgatggtctcacaaaaatattaaacctctttctgatggagtcgtaaaaaagttttatctctttctccttcgatggtctcacaaaaatattaaacctctttctgatggagtcgtaaaaaagttttatctctttctccttcgatggtctcacaaaaatattaaacctctttctgatggtctctataaagcgattgatttttcttaccctctagagtttcctacggtcgttggtcacacatttttttctagacactaaataaatagtaaaattaaattaattataaaattatgtatatgatttactaactttagttagataagttagtaatacataaattttagtatattaatattatattttaaa

SEQ ID NO: 591 - DNA, 819 bp, Vaccinia virus
atgagatatattataattctcgcagttttgttcattaatagtatacacgctaaaataactagttataagtttgaatccgtcaattttgattccaaaattgaatggactggggatggtctatacaatatatcccttaaaaattatggcatcaagacgtggcaaacaatgtatacaaatgtaccagaaggaacatacgacatatccgcatttccaaagaatgatttcgtatctttctgggttaaatttgaacaaggcgattataaagtggaagagtattgtacgggactatgcgtcgaagtaaaaattggaccaccgactgtaacattgactgaatacgacgaccatatcaatttgtacatcgagcatccgtatgctactagaggtagcaaaaagattcctatttacaaacgcggtgacatgtgtgatatctacttgttgtatacggctaacttcacattcggagattctgaagaaccagtaacatatgatatcgatgactacgattgcacgtctacaggttgcagcatagactttgccacaacagaaaaagtgtgcgtgacagcacagggagccacagaagggtttctcgaaaaaattactccatggagttcggaagtatgtctgacacctaaaaagaatgtatatacatgtgcaattagatccaaagaagatgttcccaatttcaaggacaaaatggccagagttatcaagagaaaatttaataaacagtctcaatcttatttaactaaatttctcggtagcacatcaaatgatgttaccacttttcttagcatgcttaacttgactaaatattcataa

SEQ ID NO: 592 - DNA, 669 bp, Vaccinia virus
atgaaccattgtctcctagcaattagtgccgtatactttaaagcaaaatggttgacgccattcgaaaaggaatttaccagtgattatcccttttacgtatcaccaacggaaatggtagatgtaagtatgatgtctatgtacggcgagctatttaatcacgcatctgtaaaggaatcattcggcaacttttcaatcatagaactgccatatgttggagatactagtatgatggtcattcttccagacaagattgatggattagaatccatagaacaaaatctaacagatacaaattttaagaaatggtgtaactctctggatgctatgtttatagatgttcacattcccaagtttaaggtaacaggctcgtataatctggtggatactctagtaaagtcaggactgacagaggtgttcggttcaactggagattatagcaatatgtgtaatttagatgtgagtgtcgacgctatgatccacaaaacgtatatagatgtcaatgaagagtatacagaagcagctgcagcaacttgtgcactggtgtcagactgtgcatcaacaattacaaatgagttctgtgtagatcatccgttcatctatgtgattaggcatgttgatggaaaaattcttttcgttggtagatattgctctccaacaactaattgttaa

SEQ ID NO: 593 - DNA, 450 bp, Vaccinia virus
atgacagccaactttagtacccacgtcttttcaccacagcactgtggatgtgacagactgaccagtattgatgacgtcaaacaatgtttgactgaatatatttattggtcgtcctatgcataccgcaacaggcaatgcgctggacagttgtattccacactcctctcttttagagatgatgcggaattagtgttcatcgacattcgcgagctggtaaaaaatatgccgtgggatgatgtcaaagattgtacagaaatcatccgttgttatataccggatgagcaaaaaaccatcagagagatttcggccatcatcggactttgtgcatatgctgctacttactggggaggtgaagaccatcccactagtaacagtctgaacgcattgtttgtgatgcttgagatgctcaattacgtggattataacatcatattccggcgtatgaattga

SEQ ID NO: 594 - DNA, 981 bp, Vaccinia virus
atgagtatactacctgttatatttcttcctatatttttttattcttcattcgttcagacttttaacgcgtctgaatgtatcgacaaagggtaatattttgcatcattcatggagttagaaaacgagccagtaatcttaccatgtcctcaaataaatacgctatcatccggatataatatattagatattttatgggaaaaacgaggagcggataatgatagaattataccgatagataatggtagcaatatgctaattctgaacccgacacaatcagactctggtatttatatatgcattaccacgaacgaaacctactgtgacatgatgtcgttaaatttgacaatcgtgtctgtctcagaatcaaatatagattttatctcgtatccacaaatagtaaatgagagatctactggcgaaatggtatgtcccaatattaatgcatttattgctagtaacgtaaacgcagatattatatggagcggacatcgacgccttagaaataagagacttaaacaacggacacctggaattattaccatagaagatgttagaaaaaatgatgctggttattatacatgtgttttagaatatatatacggtggcaaaacatataacgtaaccagaattgtaaaattagaggtacgggataaaataatacatcctactatgcaattaccagaaggtgttgtaacttcaataggtagtaatttgactattgcgtgtagagtatcgttgagacctcccacaacggatgcagacgtcttttggataagtaatggtatgtattacgaagaagatgatggggacggagacggtagaataagtgtagcaaataaaatctatatgaccgataagagacgtgttattacatcccggttaaacattaatcctgtcaaggaagaagatgctacaacgtttacgtgtatggcgtttactattcctagcatcagcaaaacagttactgttagtataacgtga

SEQ ID NO: 595 - DNA, 1023 bp, Vaccinia virus
atgtctagaaagtttatgcaggtgtatgaatatgacagagagcaatatctcgatgagttcattgaagacagatataacgatagttttatcactagtccagaatactatagcgcggaaaaatacatgtgtagatatactacactaaatcacaattgtgtaaacgtacgacgatgtgcgttagattccaagttattacatgatatcataaccaattgtaaaatatataacaatatagaattagttagggcgacaaaatttgtttattatctggatctgataaaatgtaattgggtatctaaggtaggtgattcggttctatatcccgttatatttataacacatacaagtactagaaatttagataaagtctctgtaaaaacatacaagggcgttaaagtaaaaaaacttaatagatgcgcggatcatgctattgtaattaatccattcgtcaagtttaaactaacgttgccgaacaaaacaagtcatgcaaaggtattggttacattttgtaagttaagaacggatataactccggtagaagctccgcttccgggcaatgttttagtttatacatttcctgacattaataaaagaattcctggatatatacatgtcaacatagaaggatgtatcgatggaatgatttatataaattcttcaaagtttgcgtgtgttttaaaactacatagatcaatgtatcgcattccaccctttcctatagatatctgctcttgttgttcacaatatactaacgatgacatagaaattcccattcatgatttaataaaggatgtggcaatttttaaaaataaggagacggtatattatctaaaattaaataataaaactatagctagatttacgtactttaataatatagatactgcaattacacaagaacacgagtatgtcaaaatagctctaggtatagtctgcaagttaatgattaataatatgcatagtatcgtgggagttaatcatagcaatacgttcgtcaattgcttgttggaagataatgtataa

SEQ ID NO: 596 - DNA, 1725 bp, Vaccinia virus
atgagtcgtcgtctgatttatgttttaaatatcaaccgcaaatcaactcataaaatacaagagaatgaaatatatacatattttagtcattgcaatatagaccatacttctacagaacttgattttgtagttaaaaactatgatctaaacagacgacaacatgtaactgggtatactgcactacactgctatttgtataataattactttacaaacgatgtactgaagatattattaaatcatgacgtaaatgtaacgatgaaaaccagtagcggacgtatgcctgtttatatattgcttactagatgttgtaatatttcacatgatgtagtgatagatatgatagacaaagataaaaaccacttatcgcatagagactattccaacctactactagagtatataaaatctcgttacatgttattgaaggaagaggatatcgatgagaacatagtatcaactttattagataagggaatcgatcctaactttaaacaagacggatatacagcgttacattattattatttgtgtctcgcacacgtttataaaccaggtgagtgtagaaaaccgataacgataaaaaaggccaagcgaattatttctttgtttatacaacatggagctaatctaaacgcgttagataattgtggtaatacaccattccatttgtatcttagtattgaaatgtgtaataatattcatatgactaaaatgctgttgacttttaatccgaatttcaaaatatgtaataatcatggattaacgcctatactatgttatataacttccgactacatacaacacgatattcttgttatgttaatacatcactatgaaacaaatgttggagaaatgccgatagatgagcgtcgtatgatcgtattcgagtttatcaaaacatattctacacgtcctgcagattcgataacttatttgatgaataggtttaaaaatataaatatttatacccgctatgaaggaaagacattattacacgtagcatgtgaatataataatacacaagtaatagattatcttatacgtatcaacggagatataaatgcgttaaccgacaataacaaacacgctacacaactcattatagataacaaagaaaattccccatataccattaattgtttactgtatatacttagatatattgtagataagaatgtgataagatcgttggtggatcaacttccatctctacctatcttcgatataaaatcatttgagaaattcatatcctactgtatacttttagatgacacattttacgataggcacgttaagaatcgcgattctaaaacgtatcgatacgcattttcaaaatacatgtcgttcgataaatacgatggtataataactaaatgtcacgacgaaacaatgttactcaaactgtccactgttctagacactacactatatgcagttttaagatgtcataattcgagaaagttaagaagatacctcaccgagttaaaaaaatataataacgataagtcctttaaaatatattctaatattatgaatgagagataccttaatgtatattataaagatatgtacgtgtcaaaggtatatgataaactatttcctgttttcacagataaaaattgtctactaacattactaccttcagaaattatatacgaaatattatacatgctgacaattaacgatctttataatatatcgtatccacctaccaaagtatag

SEQ ID NO: 597 - DNA, 1062 bp, Vaccinia virus
atgacgatgaaaatgatggtacatatatatttcgtatcattatcattattgttattgctattccacagttacgccatagacatcgaaaatgaaatcacagaattcttcaataaaatgagagatactctaccagctaaagactctaaatggttgaatccagcatgtatgttcggaggcacaatgaatgatatggccactctaggagagccattcagtgcaaagtgtcctcctattgaagacagtcttttatcgcacagatataaagactatgtggttaaatgggagaggctagaaaagaatagacggcgacaggtttctaataaacgtgttaaacatggtgatttatggatagccaactatacatctaaattcagtaaccgtaggtatttgtgcaccgtaactacaaagaatggtgactgtgttcagggtatagttagatctcatattaaaaaacctccttcatgcattccaaaaacatatgaactaggtactcatgataagtatggcatagacttatactgtggaattctttacgcaaaacattataataatataacttggtataaagataataaggaaattaatatcgacgacattaagtattcacaaacgggaaaggaattaattattcataatccagagttagaagatagcggaagatacgactgttacgttcattacgacgacgttagaatcaagaatgatatcgtagtatcaagatgtaaaatacttacggttataccgtcacaagaccacaggtttaaactaatactagatccgaaaatcaacgtaacgataggagaacctgccaatataacatgcactgctgtgtcaacgtcattattgattgacgatgtactgattgaatgggaaaatccatccggatggcttataggattcgattttgatgtatactctgttttaactagtagaggcggtatcaccgaggcgaccttgtactttgaaaatgttactgaagaatatataggtaatacatataaatgtcgtggacacaactattattttgaaaaaacccttacaactacagtagtattggagtaa

SEQ ID NO: 598 - DNA, 384 bp, Vaccinia virus
atggatgaagatacgcgactatctaggtatttgtatctcaccgatagagaacatataaatgtagactctattaaacagttgtgtaaaatatcagatcctaatgcatgttatagatgtggatgtacggctttacatgagtacttttataattatagatcagtcaacggaaaatacaagtatagatacaacggttactatcaatattattcatctagcgattatgaaaattataatgaatattattatgatgattatgatagaactggtatgaacagcgagagcgatagtgagagtgataatatatcaatcaaaacagaatatgagaatgaatatgaattctatgatgaaacacaagatcaaagtacacaacacaatgacttataa

SEQ ID NO: 599 - DNA, 276 bp, Vaccinia virus
atgtcgttagaatcatttatcataactacgtttaataataattcatcaacgaatatcgataacatgtgtcatttatacgttaaagtctgtccgtcttctctattgtttagactgtttgtagaatgctgtgatataaacaaactagtagaaggtacgactccgttacactgttatctaatgaatgaaggatttgaatcatctgttttaaaaaacctattaaaggagtatgtcatgaatacgtttaatgttcatgacatccattacacaaatatttaa

SEQ ID NO: 600 - DNA, 546 bp, Vaccinia virus
atgatatcactctcattcctcatccacaacccattaaaaaaatggaaattaaagccctctattagcataaacggctacaggtctacctttacaatggcctttccttgtgcccagttcagaccctgtcattgccacgctactaaggactccctgaataccgtggccgacgtcagacattgtctgactgaatacatcctgtgggtttctcatagatggacccatagagaaagcgcagggtctctctacaggcttctcatctctttcagaactgatgcaacggagctctttggtggtgagttgaaggattcacttccgtgggacaatatcgacaattgcgtggagatcattaaatgtttcatcagaaatgactccatgaaaaccgccgaagaacttcgtgcaatcattggactttgtactcaatcagctatcgtctctggaagagtcttcaacgataagtatatcgacatactacttatgctgcgaaagattctgaacgagaacgactatctcaccctcttggatcatatccgcactgctaaatactaa

SEQ ID NO: 601 - DNA, 1161 bp, Vaccinia virus
atgattgccttcatcatttttcgtgaaataggaataattagcaccagaatagctatggattattgtggtagagagtgcactattctatgtcgtctactggatgaagatgtgacgtacaaaaaaataaaactagagattgaaacgtgtcacaacttatcaaaacatatagatagacgaggaaacaatgcgctacattgttacgtctccaataaatgcgatacagacattaagattgttcgactgttactctctcgcggagtcgagagactttgtagaaacaacgaaggattaactccgctaggagcatacagtaagcatagatacgtaaaatctcagattgtgcatctactgatatccagctattcgaattcctctaacgaactcaagtcgaatataaatgatttcgatctgtcttcggataatatcgacttacgtctgctaaaatacctaattgtggataaacggatacgtccgtccaagaatacgaattatgcaatcaatggtctcggattggtggatatatacgtaacgacgcctaatccgagaccagaagtattgctatggcttcttaaatcagaatgttacagcaccggttacgtatttcgtacctgtatgtacaacagtgatatgtgtaagaactctcttcattactatatatcgtctcatagagaatctcaatctctatccaaggatgtaattaaatgtttgatcaataacaatgtttccatccatggcagagacgaaggaggatctttacccatccaatactactggtctttctcaaccatagatatagagattgttaaattattattaataaaggatgtggacacgtgtagagtatacgacgtcagccctatattagaggcgtattatctaaacaagcgatttagagtaaccccatataatgtagacatggaaatcgttaatcttcttattgagagacgtcatactcttgtcgacgtaatgcgtagtattacttcgtacgattccagagaatataaccactacatcatcgataacattctaaagagatttagacaacaggatgaatccatcgtacaagccatgttgataaactacttacattacggcgatatggtcgttcgatgcatgttagataacggacaacaactatcctctgcacgactactttgttaa

SEQ ID NO: 602 - DNA, 453 bp, Vaccinia virus
atgtacggtctgatattatcgagatttaataattgcgggtatcactgttatgaaaccatactaatagatgtatttgatatactaagcaagtacatggatgatatagatatgatcgataatgagaataaaactctactatattacgcggtcgatgtcaataatatacaatttgcaaagcggttattggaatatggagcgagtgttacaacatcacgctcgataatcaatacggccatccagaaaagcagttaccaaagagaaaacaaaacgaggatagttgatttattacttagctaccatcccactctagagactatgattgacgcatttaatagagatatacgctatctatatcctgaaccattattcgcctgtatcagatacgccttaatcctagatgatgattttccttctaaagtaagtatgatatcgccggtcatcataaggaactaa

SEQ ID NO: 603 - DNA, 780 bp, Vaccinia virus
atgtctcgcataaacattactaaaaaaatatattgttctgtttttctttttctttttctttttctttcgtacatctctaattatgaaaaagtaaatgatgaaatgtatgagatgggcgagatggacgagattgtgagcatcgttcgcgacagtatgtggtacatacctaacgtatttatggacgacggtaagaatgaaggtcacgtttctgtcaacaatgtttgtcatatgtattttacgttctttgatgtggatacatcgtctcatctgtttaagctagttattaaacactgcgatctgaataaacgaggtaactctccattacattgctatacgatgaatacacgatttaatccatctgtattaaagatattgttacaccacggcatgcgtaactttgatagcaaggatgaaaaaggacaccactatctgattcattcactatcaatcgataacaagatctttgatatactaacggacaccattgatgactttagtaaatcatccgatctattgctgtgttatcttagatataaattcaatgggagcttaaactactacgttctgtacaaaggatccgaccctaattgcgccgacgaggatgaactcacttctcttcattactactgtaaacacatatccacgttctacaaaagcaattattacaagttaagtcacactaagatgcgagccgagaagcgattcatctacgcgataatagattatggagcaaacattaacgcggttacacacttaccttcaacagtataccaaacatag

SEQ ID NO: 604 - DNA, 312 bp, Vaccinia virus
atggagcaaacattaacgcggttacacacttaccttcaacagtataccaaacatagtcctcgtgtggtgtatgctcttttatctcgaggatacgtaataatcttgattgtacacccatcatggaacgattgtgcaacaggtcatattctcataatgttactcaattggcacgaacaaaaggaagaaggacaacatctactttatctattcataaaacataatcaaggatacactctcaatatactacggtatctactagataggttcgacattcagaaagacgaatacatataccgcctttcaaaattgtaa

SEQ ID NO: 605 - DNA, 342 bp, Vaccinia virus
atgttgcctcatacatcggatacgacatcaaccttccgactaaagacggtattcgacttggtgtttgaaaacagaaacatcatatacaaggcggatgttgtgaatgacatcatccaccacagactgaaagtatctctacctatgattaaatcgttgttctacaagatgtcagaattctctccctacgacgattactacgtaaaaaagatactagcctactgcctattaagggacgagtcattcgcggaactacatagtaaattctgtttaaacgaggactataaaagtgtatttatgaaaaatatatcattcgataagatagattccatcatcgtgacataa

SEQ ID NO: 606 - DNA, 369 bp, Vaccinia virus
atgaagtccgtattatactcgtatatattgtttctctcatgtataataataaacggaagagatatagcaccgcatgcaccatccgatggaaagtgtaaagacaacgaatacaaacgccataatttgtgtccgggaacatacgcttccagattatgcgatagcaagactaacacacaatgtacgccgtgtggttcgggtaccttcacatctcgcaataatcatttacccgcttgtctaagttgtaacggaagacgcgatcgtgtaacactactcacaatagaatctgtgaatgctctcccggatattattgtcttctcaaaggatcatccggatgcaaggcatgtgtttcccaaacaaaatgtggaatag

SEQ ID NO: 607 - DNA, 735 bp, Vaccinia virus
atgcatgtgcctgccagtcttcagcaatcatcctcatcctcctcctcgtgtacggaagaagaaaacaaacatcatatgggaatcgatgttattatcaaagtcacaaagcaagaccaaacaccgaccaatgataagatttgccaatccgtaacggaaattacagagtccgagtcagatccagatcccgaggtggaatcagaagatgattccacatcagtcgaggatgtagatcctcctaccacttattactccatcatcggtggaggtctgagaatgaactttggattcaccaaatgtcctcagattaaatccatctcagaatccgctgatggaaacacagtgaatgctagattgtccagcgtgtccccaggacaaggtaaggactctcccgcgatcactcgtgaagaagctctggctatgatcaaagactgtgaggtgtctatcgacatcagatgtagcgaagaagagaaagacagcgacatcaagacccatccagtactcgggtctaacatctctcataagaaagtgagttacgaagatatcatcggttcaacgatcgtcgatacaaaatgtgtcaagaatctagagtttagcgttcgtatcggagacatgtgcaaggaatcatctgaacttgaggtcaaggatggattcaagtatgtcgacggatcggcatctgaaggtgcaaccgatgatacttcactcatcgattcaacaaaactcaaagcgtgtgtctga

SEQ ID NO: 608 - DNA, 675 bp, Vaccinia virus
atggtgaaaaataataaaataagtaatagctgccgaatgataatgagtactaaccctaataatattctaatgagacatctcaaaaatcttacagatgatgaatttaaatgtattattcatcgatcatctgattttctttatttgtccgatagtgactatactagtataaccaaagaaacattagttagtgagatcgtagaagaatatccggatgattgtaataaaatattagctattatatttttggtgttagataaagacatagatgtagatatagaaactaaactaaagcctaaacccgcagttagatttgccattctagacaagatgactgaggatattaaactaacggatctagtcagacattattttagatacatagaacaagatataccactaggtccgttgttcaaaaaaatagattcgtacagaacaagagccattaataagtattcgaaagagttaggattggctactgaatactttaataagtacggacatttaatgttttatactctccctataccatataacagattcttttgtagaaattcgataggctttttagcggttctatcgcctacgataggacacgtaaaagcattttataaattcatagaatatgtttctatagatgatagacgcaaatttaaaaaggaattaatgtcgaaatga

SEQ ID NO: 609 - DNA, 1539 bp, Vaccinia virus
atggaaagcgtgatattttctatcaatggggaaattatacaagtgaataaggaaattattacggcgtctccgtataatttttttaaacgcattcaggatcaccatctaaaggatgaagcgattatattgaatggtataaactatcacgcgtttgaatcgctattagactatatgcgctggaagaagataaacatcaccataaacaatgtagaaatgatactagttgctgccgtaataattgatgttccgcctgtagtagatctatgtgtaaaaactatgattcataatattaattccacaaattgtataaggatgtttaacttttctaaaagatatggaattaaaaaactatataatgcgtcgatgtcagaaataatcaacaatattactgcggtgacatccgatccagaatttggaaaattatcaaaggatgaactgacaactatcttatcccacgaagacgttaacgtaaatcatgaggatgttacagctatgatattattaaagtggatacataaaaatccaaacgatgtagatatcatcaacattttacatcccaagtttatgactaatactatgcgcaatgctatatcattgttgggattaactatatccaaatctacaaagccagtgacacgaaatggtataaaacataatatagtagtcattaaaaactctgattatatatccacaataacccattactctcctaggacagaatattggacgatagtcggtaatacagatagacaattctataatgcaaatgttttacataattgtctatacattattggcggcatgattaacaatagacatgtttattccgtatcgcgggtagatcttgaaacgaaaaaatggaaaacggttactaatatgtcgtcgttaaaatcagaagttagtacttgtgttaacgatggaaagttatatgtaataggaggattagaattttctatttcaacgggtgtggcagaatatttgaaacacggcacttcgaaatggataagacttccaaacttaattactcctagatattcaggcgcgtcggtattcgtaaacgatgatatatatgtaatgggtggagtttataccacgtatgaaaaatatgtagtattaaacgatgtggaatgtttcactaaaaatcgttggataaaaaagtctcccatgcctagacatcatagtatagtttatgctgtagagtacgacggcgacatctatgtaattactggaattactcacgagactcgtaattatctatacaaatatatagttaaggaagacaaatggatagaattgtacatgtactttaaccatgtaggaaagatgttcgtgtgttcttgcggtgattatatcttaattatagcagatgcaaaatacgaatattatccaaaatcaaatacttggaatttgttcgatatgtcaactcgtaatatcgaatattatgatatgtttactaaagatgagactccaaagtgtaacgtaactcataagtcactgccatcgtttttgagcaactgtgaaaaacaatttctacaatag

SEQ ID NO: 610 - DNA, 681 bp, Vaccinia virus
atgttgtcgatgtttatgtgtaataatatcgtagattatgtagatgatatagataatggtatagtacaggatatagaagatgaggctagcaataatgttgatcacgactatgtatatccacttccagaaaatatggtatatagatttgacaagtccactaacatactcgattatctatcaacggaacgggaccatgtaatgatggctgttcgatactatatgagtaaacaacgtttagacgacttgtatagacagttgcccacaaagactagatcatatatagatattatcaacatatattgtgataaagttagtaatgattataatagggacatgaatatcatgtatgatatggcatctacaaaatcatttacagtttatgacataaataacgaagttaatactatactaatggataacaaggggttgggtgtaagattggcgacaatttcatttataaccgaattgggtagacgatgtatgaatccagtaaaaactataaaaatgtttactctactatcgcatactatatgcgatgattgttttgtagattatataacggacatttcaccaccagataataccatccctaacactagcacgcgtgaatatctaaagcttattggcatcacagctatcatgtttgctacatataaaactctcaaatacatgataggataa

SEQ ID NO: 611 - DNA, 444 bp, Vaccinia virus
atgttcaacatgaatattaactcaccagttagatttgttaaggaaactaacagagctaaatctcctactaggcaatcgccgggtgctgccggatatgatttgtatagcgcttacgattatactatccctccaggagaaagacagttaattaagacagatattagtatgtccatgcctaagatttgctatggtagaatagctcctaggtctggtctgtcactaaaaggcattgatataggaggtggtgtaatagacgaagattataggggaaacataggagtcattcttattaataatggaaaatgtacgtttaatgtaaatactggagatagaatagctcagctaatctatcaacgtatatattatccagaactggaagaagtacaatctctagatagtacaaatagaggagatcaagggtttggatcaacaggacttagataa

SEQ ID NO: 612 - DNA, 1443 bp, Vaccinia virus
atgccgatatttgtcaatactgtgtactgtaagaatatattagcattgtctatgactaagaaattcaaaacaattattgatgctataggtggcaatataatagtcaattctacgatattgaaaaagttatctccttactttcgcacacatttacgtcaaaaatacacgaaaaataaagatccagttacaagggtttgtctagaccttgacattcacagtttaacttctatagttatttactcgtatactggaaaggtatatatagatagtcataacgtcgtcaatttattacgtgcttctatattaacctctgtagaatttatcatctacacttgtataaactttatcttacgagattttagaaaggaatattgtgtcgagtgttacatgatgggtatagaatacggactatccaatctcttatgtcatactaaaaactttattgccaaacactttttggaactggaagatgacatcatagacaattttgattatctatctatgaaacttattctagaaagcgatgaactaaatgttccagatgaggattatgtagttgattttgtcattaagtggtatataaagcgaagaaataaattaggaaatctgctactccttatcaaaaatgtaatcaggtcaaattatctttctcccagaggtataaataatgtaaaatggatactagactgtaccaaaatatttcattgtgataaacaaccacgcaaatcatacaagtatccattcatagagtatcctatgaacatggatcaaattatagatatattccatatgtgtacaagtactcatgttggagaagtagtatatctcatcggtggatggatgaacaatgaaatacataacaatgctatagctgtaaattatatatcaaacaattggattccaattcctccgatgaatagccccagactgtatgctacggggatacccgctaacaataaattatacgtagtaggaggtctaccaaatcccacatctgttgagcgttggttccacggggatgctgcttgggttaatatgccgagtcttctgaaacctagatgtaatccagcagtggcatccataaacaatgttatatacgtaatgggaggacattctgaaactgatacaactacagaatatttgctacccaatcatgatcagtggcagtttggaccatccacttattatcctcattataaatcatgcgcgttagtgttcggtagaaggttattcttggttggtagaaatgcggaattttattgtgaatccagcaatacatggactctgatagatgatcctatttatccgagggataatccagaattgatcatagtggataataaactgctattgataggaggattttatcgtggatcgtatatagatactatagaagtgtacaatcatcacacttattcatggaatatatgggatggtaaataa

SEQ ID NO: 613 - DNA, 855 bp, Vaccinia virus
atggatctgtcacgaattaatacttggaagtctaagcagctgaaaagctttctctctagtaaagatacatttaaggcggatgtccatggacatagtgccttgtattatgcaatagctgataataacgtgcgtctagtatgtacgttgttgaacgctggagcattgaaaaatcttctagagaatgaatttccattacatcaggcagccacattagaagataccaaaatagtaaagattttgctattcagtggaatggatgattcacaatttgatgacaaaggaaacaccgcattgtattatgcggttgatagtggtaacatgcaaacggtgaaactgtttgttaagaaaaattggagactgatgttctatgggaaaactggatggaaaacttcattttatcatgccgtcatgcttaatgatgtaagtattgtatcatactttctttcagaaataccatctacttttgatctggctattctccttagttgtattcacaccactataaaaaatggacacgtggatatgatgattctcttgctcgactatatgacgtcgacaaacaccaataattcccttctcttcattccggacattaaattggctatagataataaagacattgagatgttacaggctctgttcaaatacgacattaatatctactctgttaatctggaaaatgtactattggatgatgccgaaataactaagatgattatagaaaagcatgttgaatacaagtctgactcctatacaaaagatctcgatatcgtcaagaataataaattggatgaaataattagcaaaaacaaggaactcagactcatgtacgtcaattgtgtaaagaaaaactaa

SEQ ID NO: 614 - DNA, 1110 bp, Vaccinia virus
atgattgcgttattgatactatcgttaacgtgttcagtgtctacctatcgtctgcaaggatttaccaatgccggtatagtagcgtataaaaatattcaagatgataatattgtcttctcaccgtttggttattcgttttctatgtttatgtcgctattgcctgcatcaggtaatactagaatagaattattgaagactatggatttgagaaaaagagatctgggtccagcatttacagaattaatatcaggattagctaagctgaaaacatctaaatatacgtacactgatctaacttatcaaagtttcgtagataatactgtgtgcattaaaccgttgtattatcaacaatatcatagattcggcctatatagattaaactttagacgagatgcggttaataaaattaattctatagtagaacgtagatccggtatgtctaatgtagtagattctaatatgctcgacaataatactctatgggcaatcattaatactatatattttaaaggtacatggcaatatccgtttgatatcactaaaacacgcaatgctagttttactaataagtacggtacgaaaacggttcccatgatgaacgtagttactaaattgcaaggaaatacaatcacaatcgatgacgaagaatatgatatggtgcgccttccgtataaggatgctaatattagtatgtacctggcaataggtgataatatgacccatttcacagattctattacggctgcaaaattagactattggtcgtttcaattagggaataaagtgtacaatcttaaactccctaaattttctatcgaaaataagagggatattaagtcgatagccgaaatgatggctcctagtatgtttaatccagataatgcgtcgtttaaacatatgactagggacccattatatatttataaaatgtttcagaatgcaaagatagatgtcgacgaacaaggaactgtagcagaggcatctactatcatggtagctacggcgagatcatctcctgaaaaactggaatttaatacaccatttgtgttcatcattagacatgatattactggatttatattgtttatgggtaaggtagaatctccttaa

SEQ ID NO: 615 - DNA, 267 bp, Vaccinia virus
atgcttgcattttgttattcgttgcccaatgcgggcgatgtaataaagggcagagtatacgagaaggattatgctctatacatttatctttttgactatcctcactctgaagctatcttggcagagagtgttaagatgcatatggatagatatgttgaatatagggataaactggtagggaaaactgtaaaagttaaagtgattagagttgattatacaaaaggatatatagatgtcaattacaaaaggatgtgtagacatcaataa

SEQ ID NO: 616 - DNA, 1275 bp, Vaccinia virus
atgaatccggataatacaatcgcagtgattacagagactattcctataggtatgcaatttgataaagtatatttgtctacatttaacatgtggagggaaattctatccaataccacaaaaacactagatatatcatctttttattggagtttatcggatgaagtgggtacgaatttcggcacgataatattaaacgagattgtacaattacccaaaagaggagtacgagttagagtagccgtcaataaatctaacaaaccattaaaggatgttgaaagactacaaatggccggagttgaagtacgatacatagatattacaaatatcctaggaggagttcttcatacaaaattttggatatctgataatacacatatttatttaggaagcgctaacatggattggagatcactaactcaggtcaaagaattgggtattgcgatcttcaataataggaacttggcagcggatctcactcaaatttttgaggtatactggtatcttggagttaacaatctaccatataattggaaaaacttttatccgtcgtattataatacagatcatcctcttagtattaacgtaagtggtgttccacactctgtatttattgcttctgcaccgcaacaactatgtactatggaaagaaccaatgatttaaccgctttattgtcatgtattagaaatgcgagtaaattcgtttatgtatctgttatgaactttatccctattatttattcgaaggcgggtaaaattttgttttggccttatatagaagatgaattaagaagatccgctatagacagacaagtatccgttaagctattgattagttgctggcaacgatcttcgtttatcatgagaaactttttaagatctatcgctatgctaaaatctaaaaacatagatatagaagtaaagctatttattgtaccagatgctgatcctcccattccgtattctagggtaaaccatgccaaatatatggtaaccgataaaacggcctatataggtacctcaaattggacaggaaattactttacggatacatgtggagcatctattaatattacaccggatgatggattaggtcttcgtcaacaattggaagatatttttatgcgtgattggaattcaaaatacagctatgaattgtacgatactagtcctactaaaaggtgtaaactattaaaaaatatgaaacaatgtacaaatgatatatactgcgatgagatacaaccggaaaaagaaattcctgaatattctcttgaataa

SEQ ID NO: 617 - DNA, 411 bp, Vaccinia virus
atgggagcaacaatttctatactagcctcttacgataatccaaacttgtttacagcaatgattctaatgtctcctctagttaatgcagatgctgtttcaagactgaatctgctagctgccaaacttatgggaaccatcacaccaaatgcgccagtcggaaagctatgtccagaatcagtatctagagatatggataaagtttataaataccaatacgacccattaatcaatcatgaaaaaattaaggctggatttgctagtcaggtcttgaaggctaccaacaaggttagaaaaataatttccaagattaacaccccccgactctcatactccagggaacaaacaatgagattagtgatgtttcaggtgcatattatttcatgcaacatgcaaattgtaatagagaaataa

SEQ ID NO: 618 - DNA, 246 bp, Vaccinia virus
atgagtgcaaactgtatgttcaatctggacaatgattacatatattggaaacctattacatatcctaaggcattagtattcataagtcatggagctggtaaacattctggacgttatgacgaactagctgaaaacatatcatcgttaggaattttagtattctcacatgatcatattggacatggaagaagtaatggtgaaaaaatgatgattgatgactttggtacagcacgtggtaactattaa

SEQ ID NO: 619 - DNA, 450 bp, Vaccinia virus
atggcgactaaattagattatgaggatgctgttttttactttgtggatgatgataaaatatgtagtcgcgactccatcatcgatctaatagatgaatatattacgtggagaaatcatgttatagtgtttaacaaagatattaccagttgtggaagactgtacaaggaattgatgaagttcgatgatgtcgctatacggtactatggtattgataaaattaatgagattgtcgaagctatgagcgaaggagaccactacatcaattttacaaaagtccatgatcaggaaagtttattcgctaccataggaatatgtgctaaaatcactgaacattggggatacaaaaagatttcagaatctagattccaatcattgggaaacattacagatctgatgaccgacgataatataaacatcttgatactttttctagaaaaaaaattgaattga

SEQ ID NO: 620 - DNA, 1419 bp, Vaccinia virus
atgatatttgttatagagagtaaattgttgcaaatatacagaaatagaaatagaaatattaatttttatactacaatggacaacattatgtcggccgagtattatctatctctttatgccaaatataatagtaaaaatttagatgtatttaggaatatgctacaagctatcgaaccttctggaaataattatcacattctacatgcgtattgtggaattaaaggactagatgaacgatttgtcgaagaacttcttcatagaggatactctccaaatgagacggatgatgatggaaattatccattgcatatagcttctaaaattaataataatagaatagtcgcgatgctgctgacgcacggcgcagatccaaacgcgtgtgataaacataataaaacacctctatattatctctcgggaacagatgatgaagtcatagagagaataaatttattggtacagtatggagccaagattaacaactcggttgatgaagaaggatgtggtccgttgttggcgtgtacagatccttcagaaagagtgtttaaaaaaataatgtccatcggattcgaagccaggatagtggataaatttggcaaaaatcatattcatagacatcttatgtcagacaatccaaaagcttctacaatctcatggatgatgaaactaggaattagtccctcaaaaccagatcatgatggaaatacacctctccatattgtatgctctaaaacagtcaagaatgtagacattatagatcttttacttccatcaacggatgttaataaacaaaacaaattcggagatagtcctcttacacttcttattaagacattgagcccagcgcatcttattaacaaattgctatcgactagcaatgttattacggatcaaacagttaatatttgtatcttttatgatagagatgatgttctagaaattattaatgataaaggaaagcaatatgattctaccgattttaagatggctgttgaagtgggatccataagatgcgtcaaatatctattagacaatgatataatttgtgaagatgctatgtactacgctgtactatctgaatacgaaacaatggtagactatctattgttcaatcattttagtgtagactctgtagttaacggtcatacatgtatgagcgaatgtgtaagactaaataacccagtcattttatcgaagctgatgttacataatcctacttctgagaccatgtatctaactatgaaagctatagaaaaagataaactagataaatctattattattccgtttatcgcgtactttgtacttatgcatccggacttttgtaaaaatcgtagatactttacttcatataaacgttttgtaactgattatgttcatgaaggagtatcttacgaagtattcgatgattatttttaa

SEQ ID NO: 621 - DNA, 663 bp, Vaccinia virus
atggtttacaaattagtcttgctcttttgtatcgcatctctcgggtattcggtagaatacaagaatactatatgtcctcctcgacaagattaccggtattggtactttgccgccgaactcactattggtgtaaattacgacattaattctactattattggtgagtgtcatatgagtgaaagctatatcgacagaaatgctaacatagtgttgactggatacggactagaaataaacatgaccatcatggatacggatcagagatttgtggcagcggctgagggtgttggtaaagataataaactatctgttctgttgtttaccactcagcggctagataaagttcatcataatattagtgtgacaataacatgtatggaaatgaattgtggaaccacaaaatacgatagcgatcttccggaatcaattcataaatcatcatcgtgtgatataactataaatggatcatgtgtgacatgtgttaacttagagactgatccaacaaagattaatccccattacctacaccccaaggataaatatctttatcataattctgagtatggcatgcgtggtagttatggcgtgacatttatagatgaactaaaccagtgccttcttgacataaaagaactaagttatgatatttgttatagagagtaa

SEQ ID NO: 622 - DNA, 354 bp, Vaccinia virus
atgaggactctacttattagatatattctttggagaaatgacaacgatcaaacctattataatgatgattttaaaaagcttatgttgttggatgaattggtagatgacggcgatgtatgtacattgattaagaacatgagaatgacgctgtccgacggtccattgctagatagattgaatcaaccagttaataatatagaagacgctaagcgaatgatcgctattagtgccaaagtggctagagacattggtgaacgttcagaaattagatgggaagagtcattcaccatactctttaggatgattgaaacatattttgatgatctaatgattgatctatatggtgaaaaataa

SEQ ID NO: 623 - DNA, 528 bp, Vaccinia virus
atgacgtcctctgcaatggataacaatgaacctaaagtactagaaatggtatatgatgctacaattttacccgaaggtagtagcatggatccaaatatcatggattgtataaacagacacatcaatatgtgtatacaacgcacctatagttctagtataattgccattttgaatagattcctaacaatgaacaaggatgaactaaacaatacacagtgtcatataattaaagaatttatgacatacgaacaaatggcgattgaccattatggagaatatgtaaacgctattctatatcaaattcgtaaaagacctaatcaacatcacaccattgatctgtttaaaaaaataaaaagaaccccgtatgacacttttaaagtggatcccgtagaattcgtaaaaaaagttatcggatttgtatctatcttgaacaaatataaaccggtttatagttacgtcctgtacgagaacgtcctgtacgatgagttcaaatgtttcattaactacgtggaaactaagtatttctaa

SEQ ID NO: 624 - DNA, 157529 bp, Artificial Sequence
  Description of Artificial Sequence: Synthetic polynucleotide
  misc_feature (18347)..(19489): remaining portion of the C2L gene
  misc_feature (19490)..(19848): remaining portion of the F3L gene
  misc_feature (153418)..(154094): sequence that is deleted and replaced in SEQ ID NO: 210
  misc_feature (154095)..(154244): portion of the B8R gene that remains in SEQ ID NO: 210
  misc_feature (154139)..(154153): sequence that is deleted and replaced in SEQ ID NO: 210
  misc_feature (154139)..(154153): potential transcription regulatory sequences of the B9R gene
  misc_feature (154263)..(154292): potential transcription regulatory sequences of the B9R gene
  misc_feature (156719)..(157114): remaining portion of the B14R gene
  misc_feature (157115)..(157529): remaining portion of the B29R (ITR) gene
tcagacacacgctttgagttttgttgaatcgatgagtgaagtatcatcggttgcaccttcagatgccgatccgtcgacatacttgaatccatccttgacctcaagttcagatgattccttgcacatgtctccgatacgaacgctaaactctagattcttgacacattttgtatcgacgatcgttgaaccgatgatatcttcgtaactcactttcttatgagagatgttagacccgagtactggatgggtcttgatgtcgctgtctttctcttcttcgctacatctgatgtcgatagacacctcacagtctttgatcatagccagagcttcttcacgagtgatcgcgggagagtccttaccttgtcctggggacacgctggacaatctagcattcactgtgtttccatcagcggattctgagatggatttaatctgaggacatttggtgaatccaaagttcattctcagacctccaccgatgatggagtaataagtggtaggaggatctacatcctcgactgatgtggaatcatcttctgattccacctcgggatctggatctgactcggactctgtaatttccgttacggattggcaaatcttatcattggtcggtgtttggtcttgctttgtgactttgataataacatcgattcccatatgatgtttgttttcttcttccgtacacgaggaggaggatgaggatgattgctgaagactggcaggcacatgcatgccaggacgatatattgtttcataattgctattgattgagtactgttctttatgattctacttccttaccatgcaataaattagaatatattttctacttttacgagaaattaattattgtatttattatttatgggtgaaaaacttactataaaaagcgggtgggtttggaattagtgatcagtttatgtatatcgcaactaccgggcatatggctatcgacatcgagaacattacccacatgataagagattgtatcagtttcgtagtcttgagtattggtattactatatagtatatagatgtcgacgctagatatacagtctccgaatgcggcatgataccgtcatcattctttgctttcgttaactgtttggaggaagaatctttgttattgcatttaatctcgaaattcagagtgcacacctttctcctgtaaagaatcctgaagtcgctaccttattaagaacggagaagtatccatcacgaaatacgggattacagtctttatgattcatagtaatagttagttccgacgttgagatggattcactgagaccggtagtggtcgtccgagtacacgacgtgtcgttgacgggatacagattaatttccacatcgatatagttaaaggtatttctgggtacgggttcgcatttatctgcggaagagacggtgtgagaatatgttccgagaccacacggagaacagatgacgtctccggatactccgtatcctattccacattttgtttgggaaacacatgccttgcatccggatgatcctttgagaagacaataatatccgggagagcattcacagattctattgtgagtagtgttacacgatcgcgtcttccgttacaacttagacaagcgggtaaatgattattgcgagatgtgaaggtacccgaaccacacggcgtacattgtgtgttagtcttgctatcgcataatctggaagcgtatgttcccggacacaaattatggcgtttgtattcgttgtctttacactttccatcggatggtgcatgcggtgctatatctcttccgtttattattatacatgagagaaacaatatatacgagtataatacggacttcataatttaataatgtagtaatcgttgtcgtgttcctgtttcctacttctccaatcatatagatattttctttctatcatggataatatttgtaatggttctttccgtacaacatactgtttagatgatattgcgcataatttccggaggcaaatacgatagtctagattgaccgatggtagactctaatttattgagtgctttgtcgacgagtttacttttacgctccatcgatagatggcactgttctatgagatcgtcgtacatgggaaatgaaatgtgtctgtccgaatgtatggcttcaagatagctgtgataccgtatacaggtcggtgtcggagattcgaatctctttgaggcgacttatgtcacgatgatggaatctatcttatcgaatgatatatttttcataaatacacttttatagtcctcgtttaaacagaatttactatgtagttccgcgaatgactcgtcccttaataggcagtaggctagtatcttttttacgtagtaatcgtcgtagggagagaattctgacatcttgtagaacaacgatttaatcataggtagagatactttcagtctgtggtggatgatgtcattcacaacatccgccttgtatatgatgtttctgttttcaaacaccaagtcgaataccgtctttagtcggaaggttgatgtcgtatccgatgtatgaggcaacattgttgttacaattttgaaaggcggtattatagtattcgtctttctgaatgtcgaacctatctagtagataccgtagtatattgagagtgtatccttgattatgttttatgaatagataaagtagatgttgtccttcttccttttgttcgtgccaattgagtaacattatgagaatatgacctgttgcacaatcgttccatgatgggtgtacaatcaagattattacgtatcctcgagataaaagagcatacaccacacgaggactatgtttggtatactgttgaaggtaagtgtgtaaccgcgttaatgtttgctccataatctattatcgcgtagatgaatcgcttctcggctcgcatcttagtgtgacttaacttgtaataattgcttttgtagaacgtggatatgtgtttacagtagtaatgaagagaagtgagttcatcctcgtcggcgcaattagggtcggatcctttgtacagaacgtagtagtttaagctcccattgaatttatatctaagataacacagcaatagatcggatgatttactaaagtcatcaatggtgtccgttagtatatcaaagatcttgttatcgattgatagtgaatgaatcagatagtggtgtcctttttcatccttgctatcaaagttacgcatgccgtggtgtaacaatatctttaatacagatggattaaatcgtgtattcatcgtatagcaatgtaatggagagttacctcgtttattcagatcgcagtgtttaataactagcttaaacagatgagacgatgtatccacatcaaagaacgtaaaatacatatgacaaacattgttgacagaaacgtgaccttcattcttaccgtcgtccataaatacgttaggtatgtaccacatactgtcgcgaacgatgctcacaatctcgtccatctcgcccatctcatacatttcatcatttactttttcataattagagatgtacgaaagaaaaagaaaaagaaaaagaaaaacagaacaatatatttttttagtaatgtttatgcgagacatataaaataaactccgtgtttatgatgccggtaaatgtttttatcatcttggacggaatcgattttgtaatatgtcatggaaacaaatgaaacaggacattatcactccatgataaattatttaatggagtaataaagtatctccatgggtaatttcgaaatcaagttatcgtctgtattaatgttgtccactatggagtcgatcctctcactgttctttacagtttctgtaatgatggacgttagttcttttttgtaccatttgatgtcggattctttgcgtatctcagtctgtggcgtttgcttcgtttaaataatatatcaaacatggagacgcctgatatgtaggcattcttcattctattaatgtctactctatagcgctttagttccttatgatgaccggcgatatcatacttactttagaaggaaaatcatcatctaggattaaggcgtatctgatacaggcgaataatggttcaggatatagatagcgtatatctctattaaatgcgtcaatcatagtctctagagtgggatggtagctaagtaataaatcaactatcctcgttttgttttctctttggtaactgcttttctggatggccgtattgattatcgagcgtgatgttgtaacactcgctccatattccaataaccgctttgcaaattgtatattattgacatcgaccgcgtaatatagtagagttttattctcattatcgatcatatctatatcatccatgtacttgcttagtatatcaaatacatctattagtatggtttcataacagtgatacccgcaattattaaatctcgataatatcagaccgtacatacatagacggccattgttagatatgtgatttacagccgcgtgtccatattttccacgataaaccttacgacgtttacatcgacgagattattattaacaaagtagtcgtgcagaggatagttgttgtccgttatctaacatgcatcgaacgaccatatcgccgtaatgtaagtagtttatcaacatggcttgtacgatggattcatcctgttgtctaaatctctttagaatgttatcgatgatgtagtggttatattctctggaatcgtacgaagtaatactacgcattacgtcgacaagagtatgacgtctctcaataagaagattaacgatttccatgtctacattatatggggttactctaaatcgcttgtttagataatacgcctctaatatagggctgacgtcgtatactctacacgtgtccacatcctttattaataataatttaacaatctctatatctatggttgagaaagaccagtagtattggatgggtaaagatcctccttcgtctctgccatggatggaaacattgttattgatcaaacatttaattacatccttggatagagattgagattctctatgagacgatatatagtaatgaagagagttcttacacatatcactgttgtacatacaggtacgaaatacgtaaccggtgctgtaacattctgatttaagaagccatagcaatacttctggtctcggattaggcgtcgttacgtatatatccaccaatccgagaccattgattgcataattcgtattcttggacggacgtatccgtttatccacaattaggtattttagcagacgtaagtcgatattatccgaagacagatcgaaatcatttatattcgacttgagttcgttagaggaattcgaatagctggatatcagtagatgcacaatctgagattttacgtatctatgcttactgtatgctcctagcggagttaatccttcgttgtttctacaaagtctctcgactccgcgagagagtaacagtcgaacaatcttaatgtctgtatcgcatttattggagacgtaacaatgtagcgcattgtttcctcgtctatctatatgttttgataagttgtgacacgtttcaatctctagttttatttttttgtacgtcacatcttcatccagtagacgacatagaatagtgcactctctaccacaataatccatagctattctggtgctaattattcctatttcacgaaaaatgatgaaggcaatcattcctcataagatgataaaaagtgtagtgagagagcatgaaggagatttagtatttagcagtgcggatatgatccaagagggtgagatagtcgttctcgttcagaatctttcgcagcataagtagtatgtcgatatacttatcgttgaagactcttccagagacgatagctgattgagtacaaagtccaatgattgcacgaagttcttcggcggttttcatggagtcatttctgatgaaacatttaatgatctccacgcaattgtcgatattgtcccacggaagtgaatccttcaactcaccaccaaagagctccgttgcatcagttctgaaagagatgagaagcctgtagagagaccctgcgctttctctatgggtccatctatgagaaacccacaggatgtattcagtcagacaatgtctgacgtcggccacggtattcagggagtccttagtagcgtggcaatgacagggtctgaactgggcacaaggaaaggccattgtaaaggtagacctgtagccgtttatgctaatagagggctttaatttccatttttttaatgggttgtggatgaggaatgagagtgatatcatattgagatacgtagttatgtagaggtgtatttcctatattatttactttcggtttcatattttaccaactctttaataaatttcttttcacgatgcatcttattgaatgacgttttctcataagtggacatatagatgcagaagtaatgaagaaaagtattacctctatcatctacataattagggtctgctcctttttttaacaacttatacagtacgtagtagtagtttatcggttttaaatcaagtctagaatatatagtggattaatatatttttatattagctaaagctatctatactatcagaaagcatatcattctcaacttcatcatgagttaaatatttgtgtaatggatgtcatgaacattaaacgtattcatgacatactcctttaataggttttttaaaacagatgattcaaatccttcattcattagataacagtgtaacggagtcgtaccttctactagtttgtttatatcacagcattctacaaacagtctaaacaatagagaagacggacagactttaacgtataaatgacacatgttatcgatattcgttgatgaattattattaaacgtagttatgataaatgattctaacgacatctctcgctagagataaaatctagtatcgtatcattaaacatctttgcatcatactcgcatagcatagtttttcataattaatacaatatttaaaagacttattcggaaagtattttaatacatgtatcatcgatggagatccatatgaggagtcacttgtagttcttcagtagtaataacagtgctatcatcgatagtataattatatgtagaaggttcatatgttgttgtaattggagtaactgttggtagttcttccgtggaatcaataattatactaacagcaatagtataattatataaatatgttccgttgatatcacatattttaatgaactcatttctaacaccctcagctatatctgtccaattaaatgtagccaacaatctactacgttctctttgattgactacttgtacggtagcgacgctacactatctttattgtcttctacatgctccaattgaatgtcatgatacaacgcagtttttcttatgcatgtttcataacaccacgaacatgtcgcagtaagatatatagccagagataatttctgtaaattcatgattgccggtcataaacaagcccgtcaataattgtggctatatattcagtttatagagcaaaataattaagcacaatagcgcttaatctcaaaatatgttatgtttatttttttcatattaaacatactggttaaaatcctctaaaggctgatcttcatctataaatcaagatcataattacatttagacagtggtttcatgtttataaaaatgttctttttgtgtgaataaggaatatactaatcaataatcaaccatcgaccccattacgatagtatgcaggcaacccccattagagaggtacgtgtaatcagtctctccagttttagtatttttataagtcattgttacataaacggcttttaaacagtctcctcgataataagccatatctggaaatttattaaatactcgagtcattttacgcacggtcaaaaaagtaagtaatgtcgacgacttcttacattctatagaaacacctagaatactcattttcttttggaaaatatcctcagactctgatttgaacaatgcacgacctatagtaaaccgtgaccaataagttatattagtcaatggtatatccaaaccatcaggtgtggatagtccagtctttggtatcgatagtgtagttattgaactgagaagttaccgtatagtctttttggtcatctctaaacaaggaaactaatacctctacactattgaacgatttatcttccgtaatgggtggactagcgatggatgaagtcacgaatataagacacgctattaatccgtatatcatcattttgatattacttataataacgatttgtttaatttttagtttatactattaattgtaaatgatattattatttttttaagtattatcagctttagtttatactattactatttgtaatatttagacatagataaacgtgataaaagtctatttgtttatatttattgcggatagcagtatttccctataaaaagtatacgtcctgtggtgtctttaatcatgtacatgaatggatggtttatgtagaccttcgtacgatataccatcgaaaagttaatcgtaaatactcctgtaacggccgatgcttctgtatactcctcattaacatctataaacgtcgtatgtagaaatttttctacagtgatagtttcattacacatcttgctaaaatctgcataatatccgaatatattagtaagtcctaaattttctaaaatcggtaccagattatacggttctgtcatttccactttaaactttggcatatacaagtctatacttttagtagataacataccacaccattttttaaatttttcatctgttatatttttttctatgttatatataccttctatgtcgtccggtagtataatcaccatactagagtttccctcgtatggaatatcgataatagagaatcctccgaataattcattaatatgtacatattgcaagttattctcggtacccaccatcatatcaacactggtaactatattcttagaaatataaaacttgtctgtatatgtaagatgtttagaaaatggatatttccacattgctttaaaatggacggcgctaacaactgtcatacgagtattaatggatagcggactagtcaataaggaattaattttaccatttgtcattgtcttaacccattcgttgattagttcctttgtttggttagcattattaaagtttacagtttgaaaatcgtcttttattttttgtaggaaggaggcgtggaactcgatactatcgctaccgtatattttatttgcggtagctagtgtcgcacaatacggaatatctacgtccatgtcattattgtcatcgggtgtattctcattcatattctctatatattttgatagttgttcagctgtagaaccagctgctccatgatttagaatagataaagtagataaaatagaaactggagaaatcaaaacattttcatcagggtgttttacgattagttctttaaagatatccatggtatagaccaaacaataacgataacgatatatatcataaataaataatgttaaatttcagtttatgtttgtaccccgtattcatacttaacaaattggtattgcgtacacaatcaatcatattacataccattaataatgcaagcataaaaaatcgttagtagatgtttctaaatataggttccgtaagcaaagaatataagaatgaagcggtaatgataaaatcaatcgttatctaaaatgatcatactcatttattttattctattatattaacacatacatttttaacagcaacacattcaatattgtattgttatttttatattatttacacaattaacaatatattattagtttatattactgaattaataatataaaattcccaatcttgttataaacacacactgagaaacagcataaacacagaatccatcaaaaatgtcgatgaaatatctgatgttgttgttcgctgctatgataatcagatcattcgccgatagtggtaacgctatcgaaacgacattgccagaaattacaaacgctacaacagatattccagctatcagattatgcggtccagagggagatggatattgtttacacggtgactgtatccacgctagagatatcgacggtatgtattgtagatgctctcatggttatacaggcattagatgtcagcatgtagtattagtagactatcaacgttcagaaaacccaaacactacaacgtcatatatcccatctcccggtattatgcttgtattagtaggcattattattattattacgtgttgtctattatctgtttataggttcactcgaagaactaataaactacctctacaagatatggttgtgccataatttttataaattttttttatgagtatttttacaaaaatgtataaagtgtatgtcttatgtatatttataaaaatgctaaatatgcgatgtatctatgttatttgtatttatctaaacaatacctctacctctagatattatacaaaaattttttatttcagcatattaaagtaaaatctagttaccttgaaaatgaatacagtgggtggttccgtatcaccagtaagaacataatagtcgaatacagtatccgattgagattttgcatacaatactagtctagaaagaaatttgtaatcatcttctgtgacgggagtccatatatctgtatcatcgtctagtttatcagtgtcccatgctatattcctgttatcatcattagttaatgaaaataactctcgtgcttcagaaaagtcaaatattgtatccatacatacatctccaaaactatcgcttatacgtttatctttaacgatacctatacctagatggttatttactaacagacattttccagatctattgactataactcctatagtttccacatcaaccaagtaatgatcatctattgttatataacaataacataactcttttccgtttttatcagtatgtatatctatattaacgtcgtcgttgtagtgaatagtagttattgatctattatatgaaacggatatgtctagaacggcaattgttttacgtccagttaacactttctttgatttaaagtctagagtctttgcaaacataatatccttatccgactttatatttcctgtagggtggtataattttattttgcctccacatatcggtgtttccaaatatattactagacaatattccatatagttattagttaagggtacccaattagaacacgtacgcttattatcatcatttggatcgtatttcataaaagttattgtactatcgatgtcaacacattctacattttttaatcgtctatatagtatttttctgatattttctataatatcagaattgtcttccatcggaagttgtatactatcagaatcagttacatgtttaaataattctctgatgtcattccttatacaatcaaattcattattaaacagtttaatagtctgtagacctttatcgtcgtaaatatccattgtcttattagttacgcttatttttatgtgtttttacgttgctttattatattttataagaatgattgtttgacgaatcacgagaactattaagacatatattattagaggtatatattataaaaaagtttttgattacgatgttataagaggaaagaggacacattaacatcatacatcaattaactacattcttataacatcgtaatcaaaagaattgcaattttgatgtataacaactgtcaatgggttatggaattgtatattacatattatacggtatgttggtaacgacaaataccgatcggtaattgtctgccggtgtaatagaattatatatatctatctattacaccggctgagtacctacactattatatgattatagtttctatttttacagtaccttaactaaagtctctagtcacaagagcaatactaccaacctacactattatatgattatagtttctatttttataggaacgcgtacgagaaaatcaaatgtctaatttctaacggtagtgttgataaacgattatcgtcaatggatacctcctctatcatgtcgtctattttcttactttgttctattaacttattagcattatatattatttgattataaaacttatattgcttattagcccaatctgtaaatatcggattattaacatatcgtttctttgtaggtttatttaacatgtacatcactgtaagcatgtccgtaccatttattttaatttgacgcatatccgcaatttctttttcgcagtcggttataaattctatatatgatggatacatgctacatgtgtacttataatcgactaatatgaagtacttgatacatattttcagtaacgatttattattaccacctatgaataagtacctgtgatcgtctaggtaatcaactgttttcttaatacattcgatggttggtaatttactcagaataatttccaatatcttaatatataattctgctatttctggaatatatttatctgccagtataacacaaatagtaatacatgtaaacccatattttgttattatattaatgtctgcgccattatctattaaccattctactaggctgacactatgcgacttaatacaatgataaagtatactacatccatgtttatctattttgtttatatcatcaatatacggcttacaaagttttagtatcgataacacatccaactcacgcatagagaaggtagggaataatggcataatatttattaggttatcatcattgtcattatctacaactaagtttccattttttaaaatatactcgacaactttaggatctctattgccaaatttttgaaaatatttatttatatgcttaaatctatataatgtagctccttcatcaatcatacatttaataacattgatgtatactgtatgataagatacatattctaacaatagatcttgtatagaaactgtatatcttttaagaattgtggatattaggatattattacgtaaactattacacaattctaaaatataaaacgtatcacggtcgaataatagttgatcaactatataattatcgattttgtgatttttcttcctaaactgtttacgtaaatagttagatagaatattcattagttcatgaccactatagttactatcgaataacgcgtcaaatatttcccgtttaatatcgcatttgtcaagataataatagagtgtggtatgttcacgataagtataataacgcatctcttttttgtgtgaaattaaatagtttattacgtccaaagatgtagcataaccatcttgtgacctagtaataatataataatagagaactgttttacccattctatcatcataatcagtggtgtagtcgtaatcgtaatcgtctaattcatcatcccaattataatattcaccagcacgtctaatctgttctattttgatcttgtatccatactgtatgttgctacatgtaggtattcctttatccaataatagtttaaacacatctacattgggatttgatgttgtagcgtatttctctacaatattaataccatttttgatactatttatttctatacctttcgaaattagtaatttcaataagtctatatcgatgttatcagaacatagatattcgaatatatcaaaatcattgatatttttatagtcgactgacgacaataacaaaatcacaacatcgtttttgatattattatttttcttggtaacgtatgcctttaatggagtttcaccatcatactcatataatggatttgcaccactttctatcaatgattgtgcactgctggcatcgatgttaaatgttttacaactatcatagagtatcttatcgttaaccatgattggttgttgatgctatcgcattttttggtttctttcatttcagttatgtatggatttagcacgtttgggaagcatgagctcatatgatttcagtactgtagtgtcagtactattagtttcgatcagatcaatgtctagatctatagaatcaaaacacgataggtcagaagataatgaatatctgtacgcttctttttgtactgtaacttctcgttttgttagatgtttgcatcgtgctttaacatcaatggtacaaattttatcctcgctttgtgtatcatattcgtccctactataaaattgtatattcagattatcatgagatgtgtatacgctaacggtatcaataaacggagcacaccatttagtcataaccgtaatccaaaaatttttaaagtatatcttaacgaaagaagttgtatcatcgttaggatttggtaaatcattatctacagtgtatggtactagatcctcataagtgtatatatctagagtaatgtttaatttatcaaatggttgataatatggatcctcatgacaatttccgaagatggaaatgagatatagacatgcaataaatctaatcgaagacatggttactccttaaaaaaatacgaataatcaccttggctatttagtaagtgtcatttaacactatactcatattaatccatggactcataatctctatacgggattaacggatgttctatatacggggatgagtagttctcttctttaactttatactttttactaatcatatttagactgatgtatgggtaatagtgtttgaagagctcgttctcatcatcagaataaatcaatatctctgtttttttgttatacagatgtattacagcctcatatattacgtaatagaacgtgtcatctaccttattaactttcaccgcatagttgtttgcaaatacggttaatcctttgacctcgtcgatttccgaccaatctgggcgtataatgaatctaaactttaatttcttgtaatcattcgaaataatttttagtttgcatccgtagttatcccctttatgtaactgtaaatttctcaacgcgatatctccattaataatgatgtcgaattcgtgctgtatacccatactgaatggatgaacgaataccgacggcgttaatagtaatttactttttcatctttacatattgggtactagttttactatcataagtttataaattccacaagctactatggaataagccaaccatcttagtataacacacatgtcttaaagtttattaattaattacatgttgttttatatatcgctacgaatttaaacagagaaatcagtttaggaaaaaaaattatctatctacatcatcacgtctctgtattctacgatagagtgctactttaagatgagacatatccgtgtcatcaaaaatatactccattaaaatgattattccggcagcgaacttgatattggatatatcacaacctttgttaatatctacgacaatagacagcagtcccatggttccataaacagtgagtttatctttctttgaagagatattttgtagagatcttataaaactgtcgaatgacatcgcatttatatctttagctaaatcgtatatgttaccatcgtaatatctaaccgcgtctatcttaaacgtttccatcgctttaaagacgtttccgatagatggtctcatttcatcagtcatactgagccaacaaatataatcgtgtataacatctttgatagaatcagactctaaagaaaacgaatcggctttattatacgcattcatgataaacttaatgaaaaatgtttttcgttgtttaagttggatgaatagtatgtcttaataattgttattatttcattaattaatatttagtaacgagtacactctataaaaacgagaatgacataactagttatcaaagtgtctaggacgcgtaattttcatatggtatagatcctgtaagcattgtctgtattctggagctattttctctatcgcattagtgagttcagaatatgttataaatttaaatcgaataacgaacataactttagtaaagtcgtctatattaactcttttattttctagccatcgtaataccatgtttaagatagtatattctctagttactacgatctcatcgttgtctagaatatcacatactgaatctacatccaattttagaaattggtctgtgttacatatctcttctatattattgttgatgtattgtcgtagaaaactattacgtagaccattttctttataaaacgaatatatagtactccaattatctttaccgatatatttgcacacataatccattctctcaatcactacatctttaagattttcgttgttaagatatttggctaaactatataattctattagatcatcaacagaatcagtatatatttttctagatccaaagacgaactctttggcgtcctctataatattcccagaaaagatattttcgtgttttagtttatcgagatctgatctgttcatatacgccatgattgtacggtacgttatgataaccgcataaaataaaaatccattttcatttttaaccaatactattcataattgagattgatgtaatactttgttactttgaacgtaaagacagtacacggatccgtatctccaacaagcacgtagtaatcaaatttggtgttgttaaacttcgcaatattcatcaatttagatagaaacttatactcatcatctgttttaggaatccatgtattattaccactttccaacttatcattatcccaggctatgtttcgtccatcatcgttgcgcagagtgaataattcttttgtattcggtagttcaaatatatgatccatgcatagatcggcaaagctattgtagatgtgatttttcctaaatctaatataaaactcgtttactagcaaacactttcctgatttatcgaccaagacacatatggtttctaaatctatcaagtggtggggatccatagttatgacgcagtaacatatattattacattcttgactgtcgctaatatctaaatatttattgttatcgtattggattctgcatatagatggcttgtatgtcaaagatatagaacacataaccaatttatagtcgcgctttacattctcgaatctaaagttaagagatttagaaaacattatatcctcggatgatgttatcactgtttctggagtaggatatattaaagtctttacagatttcgtccgattcaaataaatcactaaataatatcccacattatcatctgttagagtagtatcattaaatctattatattttatgaaagatatatcactgctcacctctatatttcgtacatttttaaactgtttgtataatatctctctgatacaatcagatatatctattgtgtcggtagacgataccgttacatttgaattaatggtgttccattttacaacttttaacaagttgaccaattcatttctaatagtatcaaactctccatgattaaatattttaatagtatccattttatatcactacggacacaaagtagctgacataaaccattgtataatttttatgttttatgtttattagcgtacacattttggaagttccggcttccatgtatttcctggagagcaagtagatgatgaggaaccagatagtttatatccgtacttgcacttaaagtctacattgtcgttgtatgagtatgatcttttaaacccgctagacaagtatccgtttgatattgtaggatgtggacatttaacaatctgacacgtgggtggatcggaccattctcctcctgaacacaggacaccagagttaccaatcaacgaatatccactattgcaactataagttacaacgcttccatcggtataaaaatcctcgtatccgttatgtcttccgttggatatagatggaggggattggcatttaacagattcacaaataggtgcctcgggattccataccatagatccagtagatcctaattcacaatacgatttagattcaccgatcaaatgatatccgctattacaagagtacgttatactagagccaaagtctactccaccaatatcaagttggccattatcgatatctcgaggcgatgggcatctccgtttaatacattgattaaagagtgtccatccagtacctgtacatttagcatatataggtcccattttttgctttctgtatccaggtagacatagatattctatagtgtctcctatgttgtaattagcattagcatcagtctccacactattcttaaatttcatattaatgggtcgtgacggaatagtacagcatgatagaacgcatcctattcccaacaatgtcaggaacgtcacgctctccaccttcatatttatttatccgtaaaaatgttatcctggacatcgtacaaataataaaaagcccatatatgttcgctattgtagaaattgtttttcacagttgctcaaaaacgatggcagtgacttatgagttacgttacactttggagtctcatctttagtaaacatatcataatattcgatattacgagttgacatatcgaacaaattccaagtatttgattttggataatattcgtattttgcatctgctataattaagatataatcaccgcaagaacacacgaacatctttcctacatggttaaagtacatgtacaattctatccatttgtcttccttaactatatatttgtatagataattacgagtctcgtgagtaattccagtaattacatagatgtcgccgtcgtactctacagcataaactatactatgatgtctaggcatgggagacttttttatccaacgatttttagtgaaacattccacatcgtttaatactacatatttttcatacgtggtataaactccacccattacatatatatcatcgtttacgaataccgacgcgcctgaatatctaggagtaattaagtttggaagtcttatccatttcgaagtgccgtgtttcaaatattctgccacacccgttgaaatagaaaattctaatcctcctattacatataactttccatcgttaacacaagtactaacttctgattttaacgacgacatattagtaaccgttttccattttttcgtttcaagatctacccgcgatacggaataaacatgtctattgttaatcatgccgccaataatgtatagacaattatgtaaaacatttgcattatagaattgtctatctgtattaccgactatcgtccaatattctgttctaggagagtaatgggttattgtggatatataatcagagtttttaatgactactatattatgttttataccatttcgtgtcactggctttgtagatttggatatagttaatcccaacaatgatatagcattgcgcatagtattagtcataaacttgggatgtaaaatgttgatgatatctacatcgtttggatttttatgtatccactttaataatatcatagctgtaacatcctcatgatttacgttaacgtcttcgtgggataagatagttgtcagttcatcctttgataattttccaaattctggatcggatgtaaatctcgtaagataaagtttatacaagtgtagatgataaattctacagaggttaatatagaagcacgtaataaattgacgacgttatgactatctatatatacctttccagtatacgagtaaataactatagaagttaaactgtgaatgtcaaggtctagacaaacccttgtaactggatctttatttttcgtgtatttttgacgtaaatgtgtgcgaaagtaaggagataactttttcaatatcgtagaattgactattatattgccacctatagcatcaataattgttttgaatttcttagtcatagacaatgctaatatattcttacagtacacagtattgacaaatatcggcatttatgtttctttaaaagtcaacatctaaagaaaaatgattatcttcttgagacataactcccattttttggtattcacccacacgtttttcgaaaaaattagtttttccttccaatgatatattttccatgaaatcaaacggattggtaacattataaatttttttaaatcccaattcagaaatcaatctatccgcgacaaattctatatatgttttcatcatttcacaattcattcctataagtttaactggaagagccgcagtaagaaattcttgttcaatggatactgcatctgttataatagatctaacggtttcttcactcggtggatacaataaatgtttaaacatcaaacatgcgaagtcgcagtgcagaccctcgtctctactaattagttcgttggaaaacgtgagtccgggcattaggccacgctttttaagccaaaatatggaagcgaatgatccggaaaagaagattccttctactgcagcaaaggcaataagtctctctccataaccggcgctgtcatgtatccacttttgagcccaatcggccttcttttttacacaaggcattgtttctatggcattaaagagatagtttttttcattactatctttaacataagtatcgatcaaaagactatacatttccgaatgaatgttttcaatggccatctgaaatccgtagaaacatctagcctcggtaatctgtacttctgtacaaaatcgttccgccaaattttcattcactattccgtcactggctgcaaaaaacgccaatacatgttttataaaatatttttcgtctggtgttagtttattccaatcattgatatctttagatatatctacttcttccactgtccaaaatgatgcctctgcctttttatacatgttccagatgtcataatattggattgggaaaataacaaatctatttggatttggtgcaaggatgggttccataactaaattaacaatatcaataaattttttttcagttatctatatgcctgtacttggattttttgtacatcgatatcgccgcaatcactacaataattacaagtattattgatagcattgttattagtactatcataattaaattatcgacattcatgggtgctgaataatcgttattatcatcattatcattttgtaattgtgacatcatactagataaatcgtttgcgagattgttgtgggaagcgggcatggaggatgcattatcattattatttaacgccttccattcggattcacaaatatggcgcgcgttcaacattttatggaaactataattttgtgaaaacagataacaagaaaactcgtcatcgttcaaatttttaacgatagtaaaccgattaaacgtcgagctaatttctaacgctagcgactctgttggatatgggtttccagatatatatcttttcagttcccctacgtatctataatcatctgtaggaaatggaagatatttccatttatctactgttcctaatatcatatgtggtggtgtagtagaaccattaagcgcgaaagatgttatttcgcatcgtattttaacttcgcaataatttctggttagataacgcactctaccagtcaagtcaatgatattagcctttacagatatattcatagtagtcgtaacgatgactccatcttttagatgcgatactcctttgtatgtaccagaatcttcgtacctcaaactcgatatatttaaacaagttaatgagatattaacgcgttttatgaatgatgatatataaccagaagttttatcctcggtggctagcgctataaccttatcattataataccaactagtgtgattaatatgtgacacgtcagtgtgggtacaaatatgtacattatcgtctacgtcgtattcgatacatccgcatacagccaacaaatataaaatgacaaatactctaacgacgttcgtacccatcttgatgcggtttaataaatgttttgatttcaatttattgtaaaaaaagattcggttttatactgttcgatattctcattgcttatattttcatctatcatctccacacagtcaaatccgtggttagcatgcacctcatcaaccggtaaaagactatcggactcttctatcattataactctagaatatttaatttggtcattattaatcaagtcaattatcttatttttaacaaacgtgagtattttactcattttttataaaaacttttagaaatatacagactctatcgtgtgtctatatcttctttttatatccaatgtatttatgtctgatttttcttcatttatcatatataatggtccaaattctacacgtgcttcggattcatccagatcattaaggttcttataattgtaacatccttctcttccctcttctacatcttccttcttattcttattcttattcttattcttattcttattcttattcttattcttagcgtcacagaatctaccacagcagaatcccatgacgagcgtcatattaaactaattcattttcaattataatatacgattagtaatgaccattaaaataaaaaatattcttcataaccggcaagaaagtgaaaagttcacattgaaactatgtcagtagtatacatcatgaaatgatgatatatatattctctattttggtggaggattatatgatataattcgtggataatcattcttaagacacatttcttcattcgtaaatcttttcacgttaaatgagtgtccatattttgcaatttcttcatatgatggcggtgtacgtggacgaggctgctcctgttcttgttgtggtcgccgactatcgtgtttgcgtttagatccctccattatcgcgattgcgtagatggagtactattttataccttgtaattaaatttttttattaattaaacgtataaaaacgttccgtatctgtatttaagagccagatttcgtctaatagaacaaatagctacagtaaaaataactagaataattgctacacccactagaaaccacggatcgtaatacggcaatcggttttcgataataggtggaacgtatattttatttaaggacttaacaattgtctgtaaaccacaatttgcttcagcggatcctgtattaactatctgtaaaagcatatgttgaccgggcggagccgaacattctccgatatctaatttctgtatatctataatattattaacctccgcatacgcattacagttcttttctagcttggataccgcactaggtacatcgtctagatctattcctatttcctcagcgatagctcttctatccttttccggaagcaatgaaatcacttcaataaatgattcaaccatgagtgtgaaactaagtctagaattactcatgcatttgttagttattcggagcgcgcaatttttaaactgtcctataacctctcctatatgaatagcacaagtgacattagtagggatagaatgttgagctaatttttgtaaataactatctataaaaagattatacaaagttttaaactctttagtttccgccatttatccagtctgagaaaatgtctctcataataaatttttccaagaaactaattgggtgaagaatggaaacctttaatctatatttatcacagtctgttttggtacacatgatgaattcttccaatgccgtactaaattcgatatctttttcgatttctggatatgtttttaataaagtatgaacaaagaaatggaaatcgtaataccagttatgtttaactttgaaattgttttttattttcttgttaatgattccagccacttgggaaaagtcaaagtcgtttaatgccgatttaatacgttcattaaaaacaaactttttatcctttagatgaattattattggttcattggaatcaaaaagtaagatattatcgggtttaagatctgcgtgtaaaaagttgtcgcagcatggtagttcgtagattttaatgtataacagagccatctgtaaaaagataaactttatgtattgtaccaaagatttaaatcctaatttgatagctaactcggtatctactttatctgccgaatacagtgctaggggaaaaattataatgtttcctctttcatattcgtagttagttctcttttcatgttcgaaaaagtgaaacatgcggttaaaatagtttataacattaatattactgttaataactgccgggtaaaagtgggatagtaatttcacgaatttgatactgtcctttctctcgttaaacgcctttagaaaaactttagaagaatatctcaatgagagttcctgaccatccatagtttgtatcaataatagcaacatatgaagaacacgtttatacagagtatgtaaaaatgttaatttatagtttaatcccatggcccacgcacacacgattaattttttttcatctccctttagattgttgtatagaaatttgggtactgtgaactccgccgtagtttccatgggactatataattttgtggcctcgaatacaaattttactacatagttatctatcttaaaaactataccatatcctcctgtagatatgtgataaaaatcgtcgtttataggataaaatcgtttatccttttgttggaaaaatgatgaattaatgtaatcattctcttctatctttagtagtgtttccctattaaaattcttaaaataatttaacaatctaactgacggagcccaattttggtgtaaatctaattgggacattatgttgttaaaatataaacagtctcctaatataacagtatctgataatctatggggagacatccattgatattcaggggatgaatcattggcaacacccatttattgtacaaaaagccccaatttacaaacgaaagtccaggtttgatagagacaaactattaactattttgtctctgtttttaacacctccacagtttttaatttctttggtaatgaaattattcacaatatcagtatcttctttatctaccagagattttactaacttgataaccttggctgtctcattcaatagggtagtaatatttgtatgtgtgatattgatatctttttgaattgtttcttttagaagtgattctttgatggtgtcagcatacgaattacaataatgcagaaactcggttaacatgcaggaattatagtaagccaattccaattgttgcctgtgttgtattagagtgtcaatatgagcaatggtgtccttgcgtttctctgatagaatgcgagcagcgattttggcgttatcatttgacgatatttctggaatgacgaatcctgtttctactaactttttggtaggacaaagtgaaacaatcaagaagatagcttctcctcctatttgtggaagaaattgaactcctctagatgatctactgacgatagtatctccttgacagatattggaccgaattacagaagtacctggaatgtaaagccctgaaaccccctcattttttaagcagattgttgccgtaaatcctgcactgtgaccaagatagagagctcctttggtgaatccatctctatgtttcagtttaaccaagaaacagtcagctggtctaaaatttccatctctatctaatacagcatctaacttgatgtcaggaactatgaccggtttaatgttatatgtaacattgagtaaatccttaagttcataatcatcactgtcatcagttatgtacgatccaaacaatgtttctaccggcatagtggatacgaagatgctatccatcagaatgtttccctgattagtattttctatatagctattcttctttaaacgattttccaaatcagtaactatgttcatttttttaggagtaggacgcctagccagtatggaagaggattttctagatcctctcttcaacatctttgatctcaatggaatgcaaaaccccatagtgaaacaaccaacgataaaaataatattgtttttcactttttataattttaccatctgactcatggattcattaatatctttataagagctactaacgtataattctttataactgaactgagatatatacaccggatctatggtttccataattgagtaaatgaatgctcggcaataactaatggcaaatgtatagaacaacgaaattatactagagttgttaaagttaatattttctatgagctgttccaataaattatttgttgtgactgcgttcaagtcataaatcatcttgatactatccagtaaaccgtttttaagttctggaatattattatcccattgtaaagcccctaattcgactatcgaatatcctgctctgatagcagtttcaatatcgacggacgtcaatactgtaataaaggtggtagtattgtcatcatcgtgataaactactggaatatggtcgttagtaggtacggtaactttacacaacgcgatatataactttccttttgtaccatttttaacgtagttgggacgtcctgcagggtattgttttgaagaaatgatatcgagaacagatttgatacgatatttgttggattcctgattatttactataatataatctagacagatagatgattcgataaatagagaaggtatatcgttggtaggataatacatccccattccagtattctcggatactctattaatgacactagttaagaacatgtcttctattctagaaaacgaaaacatcctacatggactcattaaaacttctaacgctcctgattgtgtctcgaatgcctcgtacaaggatttcaaggatgccatagattctttgaccaacgatttagaattgcgtttagcatctgatttttttattaaatcgaatggtcggctctctggtttgctaccccaatgataacaatagtcttgtaaagataaaccgcaagaaaatttatacgcatccatccaaataaccctagcaccatcggatgatattaatgtattattatagattttccatccacaattattgggccagtatactgttagcaacggtatatcgaatagattactcatgtaacctactagaatgatagttcgtgtactagtcataatatctttaatccaatctaagaaatttaaaattagattttttacactgttaaagttaacaaaggtattacccgggtacgtggatatcatatatggtattggtccattatcagtaatagctccataaactgatacggcgatggtttttatatgtgtttgatctaacgaggaagaaattcgcacccacaattcatctctagatatgtatttaatatcaaacggtaacacatcaatttcgggacgcgtatatgtttctaaatttttaatccaaatataatgatgacctatatgccctattatcatactgtcaactatagtacacctagagaacttacgatacatctgtttcctataatcgttaaattttacaaatctataacatgctaaaccttttgacgacaaccattcattaatttctgatatggaatctgtattctcgataccgtattgttctaaagccagtgctatatctccctgttcgtgggaacgctttcgtataatatcgatcaacggataatctgaagtttttggagaataatatgactcatgatctatttcgtccataaacaatctagacataggaattggaggcgatgatcttaattttgtgcaatgagtcgtcaatcctataacttctaatcttgtaatattcatcatcgacataatactatctatgttatcatcgtatattagtataccatgaccttcttcatttcgtgccaaaatgatatacagtcttaaatagttacgcaatatctcaatagtttcataattgttagctgttttcatcaagatttgtaccctgtttaacatgatggcgttctatacgtttctattttctattttttaaatttttaaatttttaacgatttactgtggctagatacccaatctctctcaaatatttttttagcctcgcttacaagctgtttatctatactattaaaactgacgaatccgtgattttggtaatgggttccgtcgaaatttgccgaagtgatatgaacatattcgtcgtcgactatcaacaattttgtattattctgaatagtgaaaaccttcacagatagatcattttgaacacacaacgcgtctagacttctggcggttgccatagaatatacgtcgttcttatcccaattaccaactagaagtctgatcttaactcctctattaatggctgcttctataatggagttgtaaatgtcgggccaatagtagctattaccgtcgacacgtgtagtgggaactatggccaaatgttcaatatctatactagtcttagctgacctgagtttatcaataactacatcggtatctagatctctagaatatcccaataggtgttccggagaatcagtaaagaacactccacctataggattcttaatatgatacgcagtgctaactggcagacaacaagccgcagagcataaattcaaccatgaattttttgcgctattaaaggctttaaaagtatcaaatcttctacgaagatctgtggccagcgggggataatcagaatatacacctaacgttttaatcgtatgtatagatcctccagtaaatgacgcgtttcctacataacatctttcatcatctgacacccaaaaacaaccgagtagtagtcccacattattttttttatctatattaacggttataaaatttatatccgggcagtgactttgtagctctcccagatttcttttccctcgttcatctagcaaaactattattttaatccctttttcagatgcctcttttagtttatcaaaaataagcgctcccctagtcgtactcagaggattacaacaaaaagatgctatgtatatatatttcttagctagagtgataatttcgttaaaacattcaaatgttgttaaatgatcggatctaaaatccatattttctggtagtgtttctaccagcctacattttgctcccgcaggtaccgatgcaaatggccacatttagttaacataaaaacttatacatcctgttctatcaacgattctagaatatcatcggctatatcgctaaaattttcatcaaagtcgacatcacaacctaactcagtcaatatattaagaagttccatgatgtcatcttcgtctatttctatatccgtatccattgtagattgttgaccgattatcgagtttaaatcattactaatactcaatccttcagaatacaatctgtatttcattgtaaatttataggcggtgtatttaagttggtagattttcaattatgtatcaatatagcaacagtagttcttgctcctccttgattctagcatcctcttcattattttcttctacgtacataaacatgtccaatacgttagacaacacaccgacgatggcggccgccacagacacgaatatgactagaccgatgaccatttaaaaacccctctctagctttcacttaaactgtatcgatcattcttttagcacatgtataatataaaaaaacattattctatttcgaatttaggcttccaaaaatttttcatccgtaaaccgataataatatatatagacttgttaatagtcggaataaatagattaatgcttaaactatcatcatctccacgattagagatacaatatttacattctttttgctgtttcgaaactttatcaatacacgttaatacaaacccaggaaggagatattgaaactgaggctgttgaaaatgaaacggtgaatacaataattcagataatgtaaaatcatgattccgtattctgatgatattagaactgctaatggatgtcgatggtatgtatctaggagtatctattttaacaaagcatcgatttgctaatatacaattatcattttgattaattgttattttattcatattcttaaaaggtttcatatttatcaattcttctacattaaaaatttccatttttaatttatgtagccccgcaatactcctcattacgtttcattttttgtctataatatccattttgttcatctcggtacatagattatccaattgagaagcgcatttagtagttttgtacattttaagtttattgacgaatcgtcgaaaactagttatagttaacattttattatttgataccctgatattaatacccctgccgttactattatttataactgatgtaacccacgtaacattggaattaactatcgatagtaatgcatcgacgcttccaaaattgtctattataaactcaccgataatttttttattacatgttttcatattcattaggattatcaaatctttaatcttactacgattgtatgcgttgatattacaagacgtcattctaaaagacggaggatttccatcaaatgccagacaatcacgtacaaagtacatggaaataggttttgttctattgcgcatcatagattcatatagaacacccgtagaaatactaatttgttttactctataaaatactaatgcatctatttcatcgttttgtataacgtctttccaagtgtcaaattccaaatttttttcattgatagtaccaaattcttctatctctttaactacttgcatagataggtaattacagtgatgcctacatgccgttttttgaaactgaatagatgcgtctagaagcgatgctacgctagtcacaatcaccactttcatatttagaatatatgtatgtaaaaatatagtagaatttcattttgtttttttctatgctataaatgaattctcattttgcatctgctcatactccgttttatatcaataccaaagaaggaagatatctggttctaaaagccgttaaagtatgcgatgttagaactgtagaatgcgaaggaagtaaagcttcctgcgtactcaaagtagataaaccctcatcacccgcgtgtgagagaagaccttcgtccccgtccagatgcgagagaatgaataaccctggaaaacaagtcccgtttatgaggacggacatgctacaaaatatgttcgcggctaatcgcgataatgtagcttctagacttttgaactaaaatacaattatatctttttcgatattaataaatccgtgtcgtccaggttttttatctctttcagtatgtgaatagataggtattttatctctattcatcatcgaatttaagagatccgataaacattgtttgtattctccagatgtcagcatctgatacaacaatatatgtgcacataaacctctggcacttatttcatgtaccttccccttatcactaaggagaatagtatttgagaaatatgtatacatgatattatcatgaattagatatacagaatttgtaacactctcgaaatcacacgatgtgtcggcgttaagatctaatatatcactcgataacacattttcatctagatacactagacattttttaaagctaaaatagtctttagtagtgacagtaactatgcgattattttcatcgatgatacatttcatcggcatattattacgcttaccatcaaagactataccatgtgtatatctaacgtattctagcatagttgccatacgtgcattaaacttttcaggatctttggatagatcttccaatctatctatttgagaaaacatttttatcatgttcaatagttgaaacgtcggatccactatatagatattatctataaagattttaggaactacgttcatggtatcctggcgaatattaaaactatcaatgatatgattatcgttttcatcttttatcaccatatagtttctaagatatgggattttacttaatataatattatttcccgtaataaattttattagaaatgccaaatctataagaaaagtcctcgaattagtttgaagaatatctatatcgccgtaccgtatatttggattaattagatatagagaatatgatccgtaacatatacaacttttattatggcgtctaagatattcttccatcaacttattaacatttttgactagggaagatacattatgacgtcccattacttttgccttgtctattattgcgacgttcatagaatttagcatatctcttgccaattcttccattgatgttacattataagaaattttagatgaaattacatttggagctttaatagtaagaactcctaatatgtccgtgtatgtggtcactaatacagattgtagttctataatcgtaaataatttacctatattatatgtttgagtctgtttagaaaagtagctaagtatacgatcttttatttctgatgcagatgtatcaacatcggaaaaaaatctttttttattcttttttactaaagatacaaatatgtctttgttaaaaacagttattttttgaatatttctagcttgtaattttaacatatgatattcattcacactaggtactctgcctaaataggtttctataatctttaatgtaatattaggaaaagtattctgatcaggattcctattcattttgaggatttaaaactctgattattgtctaatatggtctctacgcaaactttttcacagagcgatagagtttttgataactcgtttttcttaagaaatataaaactactgtctccagagctcgctctatcttttattttatttaattcgatacaaactcctgatactggttcagaaagtaattcattaattttcagtcctttatagaagatatttaatatagataatacaaaatcttcagtttttgatatcgatctgattgatcctagaactagatatattaataacgtgctcattaggcagtttatggcagcttgataattagatatagtatattccagttcatatttattagataccgcattgcccagattttgatattctatgaattcctctgaaaataaatccaaaataactaaacattctattttttgtggattagtgtactctcttccctctatcatgttcactactggtgtccacgatgataaatatctagagggaatataatatagtccataggatgccaatctagcaatgtcgaataactgtaatttgattcttcgttcttcattatgaattgattcttgaggtataaacctaacacaaattatattattagacttttcgtatgtaatgtctttcatgttataagtttttaatcctggaatagaatctattttaatgaggcttttaaacgcagagttctccaacgagtcaaagcataatactctgttgtttttcttatatacgatgttacgattttcttctttgaatggaataggtttttgaattagtttataattacaacataatagataaggaagtgtgcaaatagtacgcggaaaaaacataatagctcccctgttttcatccatggttttaagtaaatgatcactggcttctttagttaatggatattcgaacattaaccgtttcatcatcattggacagaatccatatttcttaatgtaaagagtgatcaaatcattgtgtttattgtaccatcttgttgtaaatgtgtattcggttatcggatctgctcctttttctattaaagtatcgatgtcgatctcgtctaagaattcaactatatcgacatatttcatttgtatacacataaccattactaacgtagaatgtataggaagagatgtaacgggaacagggtttgttgattcgcaaactattctaatacataattcttctgttaatacgtcttgcacgtaatctattatagatgccaagatatctatataattattttgtaagatgatgttaactatgtgatctatataagtagtgtaataattcatgtatttcgatatatgttccaactctgtctttgtgatgtctagtttcgtaatatctatagcatcctcaaaaaatatattcgcatatattcccaagtcttcagttctatcttctaaaaaatcttcaacgtatggaatataataatctattttacctcttctgatatcattaatgatatagtttttgacactatcttctgtcaattgattcttattcactatatctaagaaacggatagcgtccctaggacgaactactgccattaatatctctattatagcttctggacataattcatctattataccagaattaatgggaactattccgtatctatctaacatagttttaagaaagtcagaatctaagacctgatgttcatatattggttcatacatgaaatgatctctattgatgatagtgactatttcattctctgaaaattggtaactcattctatatatgctttccttgttgatgaaggatagaatatactcaatagaatttgtaccaacaaactgttctcttatgaatcgtatatcatcatctgaaataatcatgtaaggcatacatttaacaattagagacttgtctcctgttatcaatatactattcttgtgataatttatgtgtgaggcaaatttgtccacgttctttaattttgttatagtagatatcaaatccaatggagctacagttcttggcttaaacagatatagtttttctggaacaaattctacaacattattataaaggactttgggtagataagtgggatgaaatcctattttaattaatgctatcgcattgtcctcgtgcaaatatccaaacgcttttgtgatagtatggcattcattgtctagaaacgctctacgaatatctgtgacagatatcatctttagagaatatactagtcgcgttaatagtactacaatttgtattttttaatctatctcaataaaaaaattaatatgtatgattcaatgtataactaaactactaactgttattgataactagaatcagaatctaatgatgacgtaaccaagaagtttatctactgccaatttagctgcattatttttagcatctcgtttagattttccatctgccttatcgaatactcttccgtcgatgtctacacaggcataaaatgtaggagagttactaggcccaactgattcaatacgaaaagaccaatctctcttagttatttggcagtactcattaataatggtgacagggttagcatctttccaatcaataatttttttagccggaataacatcatcaaaagacttatgatcctctctcattgatttttcgcgggatacatcatctattatgacgtcagccatagcatcagcatccggcttatccgcctccgttgtcataaaccaacgaggaggaatatcgtcggagctgtacaccatagcactacgttgaagatcgtacagagctttattaacttctcgcttctccatattaagttgtctagttagttgtgcagcagtagctccttcgattccaatgtttttaatagccgcacacacaatctctgcgtcagaacgctcgtcaatatagatcttagacatttttagagagaactaacacaaccagcaataaaactgaacctactttatcatttttttattcatcatcctctggtggttcgtcgtttctatcgaatgtagctctgattaacccgtcatctataggtgatgctggttctggagattctggaggagatggattattatctggaagaatctctgttatttccttgttttcatgtatcgattgcgttgtaacattaagattgcgaaatgctctaaatttgggaggcttaaagtgttgtttgcaatctctacacgcgtgtctaactagtggaggttcgtcagctgctctagtttgaatcatcatcggcgtagtattcctacttttacagttaggacacggtgtattgtatttctcgtcgagaacgttaaaataatcgttgtaactcacatcctttattttatctatattgtattctactcctttcttaatgcattttataccgaataagagatagcgaaggaattctttttcggtgccgctagtacccttaatcatatcacatagtgttttatattccaaatttgtggcaatagacggtttatttctatacgatagtttgtttctggaatcctttgagtattctataccaatattattctttgattcgaatttagtttcttcgatattagattttgtattacctatattcttgatgtagtactttgatgatttttccatggcccattctattaagtcttccaagttggcatcatccacatattgtgatagtaattctcggatatcagtagcggctaccgccattgatgtttgttcattggatgagtaactactaatgtatacattttccatttataacacttatgtattaactttgttcatttatattttttcattattatgttgatattaacaaaagtgaatatatatgttaataattgtattgtggttatacggctacaatttcataatgagtggaagtcagtgtccgatgatcaatgacgatagctttactctgaaaagaaagtatcaaatcgatagtgcggagtcaacaatgaaaatggataagaagaggacaaagtttcagaatagagccaaaatggtaaaagaaataaatcagacaataagagcagcacaaactcattacgagacattgaaactaggatacataaaatttaagagaatgattaggactactactctagaagatatagcaccatctattccaaataatcagaaaacttataaactattctcggacatttcagccatcggcaaagcatcacagaatccgagtaagatggtatatgctctgctgctttacatgtttcccaatttgtttggagatgatcatagattcattcgttatagaatgcatccaatgagtaaaatcaaacacaagatcttctctcctttcaaacttaatcttattagaatattagtggaagaaagattctataataatgaatgcagatctaataaatggagaataattggaacacaagttgataaaatgttgatagctgaatctgataaatatacaatagatgcaaggtataacctaaaacccatgtatagaatcaagggaaaatctgaagaagataccctcttcatcaaacagatggtagaacaatgtgtgacatcccaggaattggtggaaaaagtgttgaagatactgtttagagatttgttcaagagtggagaatacaaagcgtacagatacgatgatgatgtagaaaatggatttattggattggatacactaaaattaaacattgttcatgatatagttgaaccatgtatgcctgttcgtaggccagtggctaagatactgtgtaaagaaatggtaaataaatactttgagaatccgctacatattattggtaaaaatcttcaagagtgcattgactttgttagtgaataggcatttcatctttctccaatactaattcaaattgttaaattaataatggatagtataaatagttattagtgataaaatagtaaaaataattattagaataagagtgtagtatcatagataactctcttctataaaaatggattttattcgtagaaagtatcttatatacacagtagaaaataatatagattttttaaaggatgatacattaagtaaagtaaacaattttaccctcaatcatgtactagctctcaagtatctagttagcaattttcctcaacacgttattactaaggatgtattagctaataccaatttttttgttttcatacatatggtacgatgttgtaaagtgtacgaagcggttttacgacacgcatttgatgcacccacgttgtacgttaaagcattgactaagaattatttatcgtttagtaacgcaatacaatcgtacaaggaaaccgtgcataaactaacacaagatgaaaaatttttagaggttgccgaatacatggacgaattaggagaacttataggcgtaaattatgacttagttcttaatccattatttcacggaggggaacccatcaaagatatggaaatcatttttttaaaactgtttaagaaaacagacttcaaagttgttaaaaaattaagtgttataagattacttatttgggcttacctaagcaagaaagatacaggcatagagtttgcggataatgatagacaagatatatacactctatttcaacaaactggtagaatcgtccatagcaatctaacagaaacgtttagagattatatctttcccggagataagactagctattgggtgtggttaaacgaaagtatagctaatgatgcggatattgttcttaatagacacgccattaccatgtatgataaaattcttagttatatatactctgagataaaacaaggacgcgttaataaaaacatgcttaagttagtttatatctttgagcctgaaaaagatatcagagaacttctgctagaaatcatatatgatattcctggagatatcctatctattattgatgcaaaaaacgacgattggaaaaaatattttattagtttttataaagctaattttattaacggtaatacatttattagtgatagaacgtttaacgaggacttattcagagttgttgttcaaatagatcccgaatatttcgataatgaacgaattatgtctttattctctacgagtgctgcggacattaaacgatttgatgagttagatattaataacagttatatatctaatataatttatgaggtgaacgatatcacattagatacaatggatgatatgaagaagtgtcaaatctttaacgaggatacgtcgtattatgttaaggaatacaatacatacctgtttttgcacgagtcggatcccatggtcatagagaacggaatactaaagaaactgtcatctataaaatccaagagtaaacggctgaacttgtttagcaaaaacattttaaaatattatttagacggacaattggctcgtctaggtcttgtgttagatgattataaaggagacttgttagttaaaatgataaaccatcttaagtctgtggaggatgtatccgcattcgttcgattttctacagataaaaaccctagtattcttccatcgctaatcaaaactattttagctagttataatatttccatcatcgtcttatttcaaaggtttttgagagataatctatatcatgtagaagaattcttggataaaagcatccatctaaccaagacggataagaaatatatacttcaattgataagacacggtagatcatagaacagaccaaatatattattaataatttggtatatacatagatattaattatcacatattaaaaattcacacatttttgataaatgggaactgctgcaacaattcagactcccaccaaattaatgaataaagaaaatgcagaaatgattttggaaaaaattgttgatcatatagttatgtatattagtgacgaatcaagtgattcagaaaataatcctgaatatattgattttcgtaacagatacgaagactatagatctctcattataaaaagtgatcacgagtttgtaaagctatgtaaaaatcatgcagagaaaagttctccagaaacgcaacaaatgattatcaaacacatatacgaacaatatcttattccagtatctgaagtactattaaaacctataatgtccatgggtgacataattacatataacggatgtaaagacaatgaatggatgctagaacaactctctaccctaaactttaacaatctccgcacatggaactcatgtagcataggcaatgtaacgcgtctgttttatacattttttagttatctgatgaaagataaactaaatatataagtataatcccattctaatactttaacctgatgtattagcatcttattagaatattaacctaactaaaagacataacataaaaactcattacatagttgataaaaagcggtaggatataaatattatggctgccaccgttccgcgttttgacgacgtgtacaaaaatgcacaaagaagaattctagatcaagaaacattttttagtagaggtctaagtagaccgttaatgaaaaacacatatctatttgataattacgcgtatggatggataccagaaactgcaatttggagtagtagatacgcaaacttagatgcaagtgactattatcccatttcgttgggattacttaaaaagttcgagtttctcatgtctctatataaaggtcctattccagtatacgaagaaaaagtaaatactgaattcatagccaatggatcgttctctggtagatacgtatcatatcttcgaaagttttctgctcttccaacaaacgagtttattagttttttattattgacctccatccctatctataatatcttattctggtttaaaaacacacagtttgatattactaaacacacattattcagatacgtctatacagataatgccaaacacctggcgttggctaggtatatgcatcaaacaggagactataagcctttgtttagtcgtctcaaagagaattatatatttaccggtcccgttccaatatgtatcaaagatatagatcaccctaatcttagtagagcaagaagtccatccgattatgagacattagctaatattagtactatattgtactttaccaagtatgatccggtattaatgtttttattgttttacgtacctgggtattcaattactacaaaaattactccagccgtagaatatctaatggataaactgaatctaacaaagagcgacgtacaactgttgtaaattattttatgcttcgtaaaatgtaggttttgaaccaaacattctttcaaagaatgagatgcataaaactttattatccaatagattgactatttcggacgtcaatcgtttaaagtaaacttcgtaaaatattctttgatcactgccgagtttaaaacttctatcgataattgtctcatatgttttaatatttacaagttttttggtccatggtacattagccggacaaatatatgcaaaataatatcgttctccaagttctatagtttctggattatttttattatattcagtaaccaaatacatattagggttatctgcggatttataatttgagtgatgcattcgactcaacataaataattctagaggagacgatctactatcaaattcggatcgtaaatctgtttctaaagaacggagaatatctatacatacctgattagaattcatccgtccttcagacaacatctcagacagtctggtcttgtatgtcttaatcatattcttatgaaacttggaaacatctcttctagtttcactagtacctttattaattctctcaggtacagattttgaattcgacgatgctgagtatttcatcgttgtatatttcttcttcgattgcataatcagattcttatataccgcctcaaactctattttaaaattattaaacaatactctattattaatcagtcgttctaactctttcgctatttctatagacttatcgacatcttgactgtctatctctgtaaacacggagtcggtatctccatacacgctacgaaaacgaaatctgtaatctataggcaacgatgttttcacaatcggattaatatctctatcgtccatataaaatggattacttaatggattggcaaaccgtaacataccgttagataactctgctccatttagtaccgattctagatacaagatcattctacgtcctatggatgtgcaactcttagccgaagcgtatgagtatagagcactatttctaaatcccatcagaccatatactgagttggctactatcttgtacgtatattgcatggaatcatagatggccttttcagttgaactggtagcctgttttaacatctttttatatctggctctctctgccaaaaatgttcttaatagtctaggaatggttccttctatcgatctatcgaaaattgctatttcagagatgaggttcggtagtctaggttcacaatgaaccgtaatatatctaggaggtggatatttctgaagcaatagctgattatttatttcttcttccaatctattggtactaacaacgacaccgactaatgtttccggagatagatttccaaagatacacacattaggatacagactgttataatcaaagattaatacattattactaaacattttttgttttggagcaaataccttaccgccttcataaggaaacttttgttttgtttctgatctaactaagatagttttagtttccaacaatagctttaacagtggacccttgatgactgtactcgctctatattcgaataccatggattgaggaagcacatatgttgacgcacccgcgtctgtttttgtttctactccataatactcccacaaatactgacacaaacaagcatcatgaatacagtatctagccatatctaaagctatgtttagattataatccttatacatctgagctaaatcaacgtcatcctttccgaaagataatttatatgtatcattaggtaaagtaggacataatagtacgactttaaatccattttcccaaatatctttacgaattactttacatataatatcctcatcaacagtcacataattacctgtggttaaaacctttgcaaatgcagcggctttgcctttcgcgtctgtagtatcgtcaccgataaacgtcatttctctaactcctctatttaatactttacccatgcaactgaacgcgttcttggatatagaatccaatttgtacgaatccaatttttcagatttttgaatgaatgaatatagatcgaaaaatatagttccattattgttattaacgtgaaacgtagtattggccatgccgcctactcccttatgactagactgatttctctcataaatacagagatgtacagcttcctttttgtccggagatctaaagataatcttctctcctgttaataactctagacgattagtaatatatctcagatcaaagttatgtccgttaaaggtaacgacgtagtcgaacgttagttccaacaattgtttagctattcgtaacaaaactatttcagaacatagaactagttctcgttcgtaatccatttccattagtgactgtatcctcaaacatcctctatcgacggcttcttgtatttcctgttccgttaacatctcttcattaatgagcgtaaacaataatcgtttaccacttaaatcgatataacagtaacttgtatgcgagattgggttaataaatacagaaggaaacttcttatcgaagtgacactctatatctagaaataagtacgatcttgggatatcgaatctaggtatttttttagcgaaacagttacgtggatcgtcacaatgataacatccattgttaatctttgtcaaatattgctcgtccaacgagtaacatccgtctggagatatcccgttagaaatataaaaccaactaatattgagaaattcatccatggtggcattttgtatgctgcgtttctttggctcttctatcaaccacatatctgcgacggagcattttctatctttaatatctagattataacttattgtctcgtcaatgtctatagttctcatctttcccaacggcctcgcattaaatggaggaggagacaatgactgatatatttcgtccgtcactacgtaataaaagtaatgaggaaatcgtataaatacggtctcaccatttcgacatctggatttcagatataaaaatctgttttcaccgtgactttcaaaccaattaatgcaccgaacatccatttatagaatttagaaatatattttcatttaaatgaatcccaaacattggggaagagccgtatggaccattatttttatagtactttcgcaagcgggtttagacggcaacatagaagcgtgtaaacgaaaactatatactatagttagcactcttccatgtcctgcatgtagacggcacgcgactattgctatagaggacaataatgtcatgtctagcgatgatctgaattatatttattattttttcatcagattatttaacaatttggcatctgatcccaaatacgcaatcgatgtgtcaaaggttaaacctttataaacttaacccattataaaacttatgattagtcacgactgaaataaccgcgtgattattttttggtataattctacacggcatggtttctgtgactatgaattcaacccccgttacattagtgaaatctttaacaaacagcaagggttcgtcaaagacataaaactcattgtttacaatcgaaatagaccccctatcacacttaaaataaaaaatatccttatcctttaccaccaaataaaattctgattggtcaatgtgaatgtattcacttaacagttccacaaatttatttattaactccgaggcacatacatcgtcggtattttttatggcaaactttactcttccagcatccgtttctaaaaaaatattaacgagttccatttatatcatccaatattattgaaatgacgttgatggacagatgatacaaataagaaggtacggtacctttgtccaccatctcctccaattcatgctctattttgtcattaactttaatgtatgaaaacagtacgccacatgcttccatgacagtgtgtaacactttggatacaaaatgtttgacattagtataattgtttaagactgtcaatctataatagatagtagctataatatattctatgatggtattgaagaagatgacaatcttggcatattgatcatttaacacagacatggtatcaacagatagcttgaatgaaagagaatcagtaattggaataagcgtcttctcgatggagtgtccgtataccaacatgtctgatattttgatgtattccattaaattatttagttttttctttttattctcgttaaacagcatttctgtcaacggaccccaacatcgttgaccgattaagttttgattgatttttccgtgtaaggcgtatctagtcagatcgtatagcctatccaataatccatcatctgtgcgtagatcacatcgtacactttttaattctctatagaagagcgacagacatctggaacaattacagacagcaatttctttattctctacagatgtaagatacttgaagacattcctatgatgatgcagaattttggataacacggtattgatggtatctgttaccataattcctttgatggctgatagtgtcagagcacaagatttccaatctttgacaatttttagcaccattatctttgttttgatatctatatcagacagcatggtgcgtctgacaacacagggattaagacggaaagatgaaatgattctctcaacatcttcaatggataccttgctattttttctggcattatctatatgtgcgagaatatcctctagagaatcagtatcctttttgatgatagtggatctcaatgacatgggacgtctaaaccttcttattctatcaccagattgcatggtgatttgtcttctttcttttatcataatgtaatctctaaattcatcggcaaattgtctatatctaaaatcataatatgagatgtttacctctacaaatatctgttcgtccaatgttagagtatctacatcagttttgtattccaaattaaacatggcaacggatttaattttatattcctctattaagtcctcgtcgataataacagaatgtagataatcatttaatccatcgtacatggttggaagatgcttgttgacaaaatctttaattgtcttgatgaaggtgggactatatctaacatcttgattaataaaatttataacattgtccataggatactttgtaactagttttatacacatctcttcatcggtaagtttagacagaatatcgtgaacaggtggtatattatattcatcagatatacgaagaacaatgtccaaatctatattgtttaatatattatatagatgtagtgtagctcctacaggaatatctttaactaagtcaatgatttcatcaaccgttagatctattttaaagttaatcatataggcattgatttttaaaaggtatgtagccttgactacattctcattaattaaccattccaagtcactgtgtgtaagaagattatattctatcataagcttgactacatttggtcccgataccattaaagaattcttatgatataaggaaacagcttttaggtactcatctactctacaagaattttggagagccttaacgatatcagtgacgtttattatttcaggaggaaaaaacctaacattgagaatgtcggagttaatagcttccagatacagtgattttggcaatagtccgtgtaatccataatccagtaacacgagctggtgcttgctagacaccttttcaatgtttaatttttttgaaataagctttgataaagccttcctcgcaaattccggatacatgaacatgtcggcgacatgattaagtattgttttttcattatttttatattttctcaacaagttctcaataccccaatagatgatagaatatcacccaatgcgtccatgttgtctatttccaacaggtcgctatatccaccaatagaagttttcccaaaaaagattctaggaacagttctaccaccagtaatttgttcaaaataatcccgcaattcattttcgggtttaaattctttaatatcgacaatttcatacgctcctcttttgaaactaaacttatttagaatatccagtgcatttctacaaaaaggacatgtatacttgacaaaaattgtcactttgttattggccaacctttgttgtacaaattcctcggccattttaatatttaagtgatataaaactatctcgacttatttaactctttagtcgagatatatggacgcagatagctatatgatagccaactacagaaggcaaacgctataaaaaacataattacgacgagcatatttataaatatttttattcagcattacttgatatagtaatattaggcacagtcaaacattcaaccactctcgatacattaactctctcattttctttaacaaattctgcaatatcttcgtaaaaagattcttgaaactttttagaatatctatcgactctagatgaaatagcgttcgtcaacatactatgttttgtatacataaaggcgcccattttaacagtttctagtgacaaaatgctagcgatcctaggatcctttagaatcacatagattgacgattcgtctctcttagtaactctagtaaaataatcatacaatctagtacgcgaaataatattatccttgacttgaggagatctaaacaatctagttttgagaacatcgataagttcatcgggaatgacatacatactatctttaatagaactcttttcatccagttgaatggattcgtccttaaccaactgattaatgagatcttctattttatcattttccagatgatatgtatgtccattaaagttaaattgtgtagcgcttctttttagtctagcagccaatactttaacatcactaatatcgatatacaaaggagatgatttatctatggtattaagaattcgtttttcgacatccgtcaaaaccaattcctttttgcctgtatcatccagttttccatcctttgtaaagaaattattttctactagactattaataagactgataaggattcctccataattgcacaatccaaactttttcacaaaactagactttacgagatctacaggaatgcgtacttcaggtttcttagcttgtgattttttcttttgcggacattttcttgtgaccaactcatctaccatttcattgattttagcagtgaaataagctttcaatgcacgggcactgatactattgaaaacgagttgatcttcaaattccgccatttaagttcaccaaacaacttttaaatacaaatatatcaatagtagtagaataagaactataaaaaaaataataattaaccaataccaaccccaacaaccggtattattagttgatgtgactgttttctcatcacttagaacagatttaacaatttctataaagtctgtcaaatcatcttccggagaccccataaatacaccaaatatagcggcgtacaacttatccatttatacattgaatattggcttttctttatcgctatcttcatcatattcatcatcaatatcaacaagtcccagattacgagccagatcttcttctacattttcagtcattgatacacgttcactatctccagagagtccgataacgttagccaccacttctctatcaatgattagtttcttgagtgcgaatgtaatttttgtttccgttccggatctatagaagacgataggtgtgataattgccttggccaattgtctttctcttttactgagtgattctagttcaccttctatagatctgagaatggatgattctccagccgaaacatattctaccatggctccgtttaatttgttgatgaagatggattcatccttaaatgttttctctgtaatagtttccaccgaaagactatgcaaagaatttggaatgcgttccttgtgcttaatgtttccatagacggcttctagaagttgatacaacataggactagccgcggtaacttttatttttagaaagtatccatcgcttctatcttgtttagatttatttttataaagtttagtctctccttccaacataataaaagtggaagtcatttgactagataaactatcagtaagttttatagagatagacgaacaattagcgtattgagaagcatttagtgtaacgtattcgatacattttgcattagatttactaatcgattttgcatactctataacacccgcacaagtctgtagagaatcgctagatgcagtaggtcttggtgaagtttcaactctcttcttgattaccttactcatgattaaacctaaataattgtactttgtaatataatgatatatattttcactttatctcatttgagaataaaaatgtttttgtttaaccactgcatgatgtacagatttcggaatcgcaaaccaccagtggttttattttatccttgtccaatgtgaattgaatgggagcggatgcgggtttcgtacgtagatagtacattcccgtttttagaccgagactccatccgtaaaaatgcatactcgttagtttggaataactcggatctgctatatggatattcatagattgactttgatcgatgaaggctcccctgtctgcagccatttttatgatcgtcttttgtggaatttcccaaatagttttataaactcgcttaatatcttctggaaggtttgtattctgaatggatccaccatctgccataatcctattcttgatctcatcattccataattttctctcggttaaaactctaaggagatgcggattaactacttgaaattctccagacaatactctccgagtgtaaatattactggtatacggttccaccgactcattatttcccaaaatttgagcagttgatgcagtcggcataggtgccaccaataaactatttctaagaccgtatgttctgattttatcttttagaggttcccaattccaaagatccgacggtacaacattccaaagatcatattgtagaataccgttactggcgtacgatcctacatatgtatcgtatggtccttccttctcagctagttcacaactcgcctctaatgcaccgtaataaatggtttcgaagatcttcttatttagatcttgtgcttccaggctatcaaatggataatttaagagaataaacgcgtccgctaatccttgaacaccaataccgataggtctatgtctcttattagagatttcagcttctggaataggataataattaatatctataattttattgagatttctgacaattactttgaccacatccttcagtttgagaaaatcaaatcgcccatctattacaaacatgttcaaggcaacagatgccagattacaaacggctacctcattagcatccgcatattgtattatctcagtgcaaagattactacacttgatagttcctaaattttgttgattactctttttgttacacgcatccttataaagaatgaatggagtaccagtttcaatctgagattctataatcgctttccagacgactcgagcctttattatagatttgtatctcctttctctttcgtatagtgtatacaatcgttcgaactcgtctccccaaacattgtccaatccaggacattcatccggacacatcaacgaccactctccgtcatccttcactcgtttcataaagagatcaggaatccaaagagctataaatagatctctggttctatgttcctcgtttcctgtattctttttaagatcgaggaacgccataatatcagaatgccacggttccaagtatatggccataactccaggccgtttgtttcctccctgatctatgtatctagcggtgttattataaactctcaacattggaataataccgtttgatataccattggtaccggagatatagcttccactggcacgaatattactaattgatagacctattccccctgccattttagagattaatgcgcatcgttttaacgtgtcatagataccctctatgctatcatcgatcatgttaagtaaaaaacagctagacatttggtgacgactagttcccgcattaaataaggtaggagaagcgtgcgtaaaccatttttcagaaagtagattgtacgtctcaatagctgagtctatatcccattgatgaattcctactgcgacacgcattaacatgtgctgaggtctttcaacgatcttgttgtttattttcaacaagtaggatttttccaaagttttaaaaccaaaatagttgtatgaaaagtctcgttcgtaaataataaccgagttgagtttatccttatatttgttaactatatccatggtgatacttgaaataatcggagaatgtttcccatttttaggattaacatagttgaataaatcctccatcacttcactaaatagtttttttgtttccttgtgtagatttgatacggctattctggcggctagaatggcataatccggatgttgtgtagtacaagtggctgctatttcggctgccagagtgtccaattctaccgttgttactccattatatattccttgaataaccttcatagctattttaataggatctatatgatccgtgtttaagccataacataattttctaatacgagacgtgattttatcaaacatgacattttccttgtatccatttcgtttaatgacaaacatttttgttggtgtaataaaaaaattatttaacttttcattaatagggatttgacgtatgtagcgtacaaaattatcgttcctggtatatagataaagagtcctatatatttgaaaatcgttacggctcgattaaactttaatgattgcatagtgaatatatcattaggatttaactccttgactatcatggcggcgccagaaattaccatcaaaagcattaatacagttatgccgatcgcagttagaacggttatagcatccaccatttatatctaaaaattagatcaaagaatatgtgacaaagtcctagttgtatactgagaattgacgaaacaatgtttcttacatatttttttcttattagtaactgacttaatagtaggaactggaaagctagacttgattattctataagtatagatacccttccagataatgttctctttgataaaagttccagaaaatgtagaattttttaaaaagttatcttttgctattaccaagattgtgtttagacgcttattattaatatgagtaatgaaatccacaccgcctctagatatcgcctttatttccacattagatggtaaatccaatagtgaaactatctttttaggaatgtatggactcgcgtttagaggagtgaacgtcttgggcgtcggaaaggatgattcgtcaaacgaataaacaatttcacaaatggatgttaatgtattagtaggaaatttcttgacgctagtggagttgaagattctaatggatgatgttctacctatttcatccgataacatgttaatttccgacaccaacggttttaatatttcgatgatatacggtagtctctctttcggacttatatagcttattccacaatacgagtcattatatactccaaaaaacaaaataactagtataaaatctgtatcgaatgggaaaaacgaaattatcgacataggtatagaatccggaacattgaacgtattaatacttaattctttttctgtggtaagtaccgataggttattgacattgtatggttttaaatattctataacttgagacttgatagatattagtgatgaattgaaaattatttttatcaccacgtgtgtttcaggatcatcgtcgacgcccgtcaaccaaccgaatggagtaaaataaatatcattaatatatgctctagatattagtatttttatcaatcctttgattatcatcttctcgtaggcgaatgattccatgatcaagagtgatttaagaacatcctccggagtattaatgggcttagtaaacagtccatcgttgcaataataaaagttatccaagttaaaggatattatgcattcgtttaaagatatcacctcatctgacggagacaattttttggtaggttttagagactttgaagctacttgtttaacaaagttattcatcgtcgtctactattctatttaattttgtagttaatttatcacatatcacattaattgactttttggtccatttttccatacgtttatattcttttaatcctgcgttatccgtttccgttatatccagtgatagatcgtgcaggttaaatagaatgctcttaaataatgtcatttttttatccgctaaaaatttaaagaatgtataaacctttttcagagatttgaaactcttaggtggtgtcctagtacacaatatcataaacaaactaataaacattccacattcagattccaacagctgattaacttccacattaatacagcctattttcgctccaaatgtacattcgaaaaatctgaataaaacatcgatgtcacaatttgtattatccaatacagaatgtctgtgattcgtgttaaaaccatcggagaaggaatagaaataaaaattattatagtggtggaattcagttggaatattgcctccggagtcataaaaggatactaaacattgttttttatcataaattacacatttccaatgagacaaataacaaaatccaaacattacaaatctagaggtagaacttttaattttgtctttaagtatatacgataagatatgtttattcataaacgcgtcaaatttttcatgaatcgctaaggagtttaagaatctcatgtcaaattgtcctatataatccacttcggatccataagcaaactgagagactaagttcttaatacttcgattgctcatccaggctcctctctcaggctctattttcatcttgacgacctttggattttcaccagtatgtattcctttacgtgataaatcatcgattttcaaatccatttgtgagaagtctatcgccttagatactttttcccgtagtcgaggtttaaaaaaatacgctaacggtatactagtaggtaactcaaagacatcatatatagaatggtaacgcgtctttaactcgtcggttaactctttcttttgatcgagttcgtcgctactattgggtctgctcaggtgccccgactctactagttccaacatcataccgataggaatacaagacactttgccggcggttgtagatttatcatatttctccactacatatccgttacaatttgttaaaaatttagatacatctatattgctacataatccagctagtgaatatatatgacataataaattggtaaatcctagttctggtattttactaattactaaatctgtatatctttccatttatcatggaaaagaatttaccagatatcttcttttttccaaactgcgttaatgtattctcttacaaatattcacaagatgaattcagtaatatgagtaaaacggaacgtgatagtttctcattggccgtgtttccagttataaaacatagatggcataacgcacacgttgtaaaacataaaggaatatacaaagttagtacagaagcacgtggaaaaaaagtatctcctccatcactaggaaaacccgcacacataaacctaaccacgaaacaatatatatacagtgaacacacaataagctttgaatgttatagttttctaaaatgtataacaaatacagaaatcaattcgttcgatgagtatatattaagaggactattagaagctggtaatagtttacagatattttccaattccgtaggtaaacgaacagatactataggtgtactagggaataagtatccatttagcaaaattccattggcctcattaactcctaaagcacaacgagagatattttcagcgtggatttctcatagacctgtagttttaactggaggaactggagtgggtaagacgtcacaggtacccaagttattgctttggtttaattatttatttggtggattctctactctagataaaatcactgactttcacgaaagaccagtcattctatctcttcctaggatagctttagttagattgcatagcaataccattttaaaatcattgggatttaaggtactagatggatctcctatttctttacggtacggatctataccggaagaattaataaacaaacaaccaaaaaaatatggaattgtattttctacccataagttatctctaacaaaactatttagttatggcactcttattatagacgaagttcatgagcatgatcaaataggagatattattatagcagtagcgagaaagcatcatacgaaaatagattctatgtttttaatgactgccacgttagaggatgacagggaacggctaaaagtatttttacctaatcccgcatttatacatattcctggagatacactgtttaaaattagcgaggtatttattcataataagataaatccatcttccagaatggcatacatagaagaagaaaagagaaatttagttactgctatacagatgtatactcctcctgatggatcatccggtatagtctttgtggcatccgttgcacagtgtcacgaatataaatcatatttagaaaaaagattaccgtatgatatgtatattattcatggtaaggtcttagatatagacgaaatattagaaaaagtgtattcatcacctaatgtatcgataattatttctactccttatttggaatccagcgttactatacgcaatgttacacacatttatgatatgggtagagtttttgtccccgctccttttggaggatcgcaagaatttatttctaaatctatgagagatcaacgaaaaggaagagtaggaagagttaatcctgggacatacgtatatttctatgatctgtcttatatgaagtctatacagcgaatagattcagaatttctacataattatatattgtacgctaataagtttaatctaacactccccgaagatttgtttataatccctacaaatttggatattctatggcgtacaaaggaatatatagactcgttcgatattagtacagaaacatggaataaattattatccaattattatatgaagatgatagagtatgctaaactttatgtactaagtcctattctcgctgaggagttggataactttgagaggacgggagaattaactagtattgtacgagaagccattttatctctaaatttacgaattaagattttaaattttaaacataaagatgatgatacgtatatacacttttgtaaaatattattcggtgtctataacggaacaaacgctactatatattatcatagacctctaacgggatatatgaatatgatttcagatactatatttgttcctgtagataataactaaaaatcaaactctaatgaccacatctttttttagagatgaaaaattttccacatctccttttgtagacacgactaaacattttgcagaaaaaagtttattagtgtttagataatcgtatacttcatcagtgtagatagtaaatgtgaacagataaaaggtattcttgctcaatagattggtaaattccatagaatatattaatcctttcttcttgagatcccacatcatttcaaccagagacgttttatccaatgatttacctcgtactataccacatacaaaactagattttgcagtgacgtcgtacctggtattcctaccaaacaaaattttacttttagttcttttagaaaattctaaggtagaatctctatttgccaatatgtcatctatggaattaccactagcaaaaaatgatagaaatatatattgatacatcgcagctggttttgatctactatactttaaaaacgaatcagattccataattgcctgtatatcatcagctgaaaaactatgttttacacgtattccttcggcatttctttttaatgatatatcttgtttagacaatgataaagttatcatgtccatgagagacgcgtctccgtatcgtataaatatttcattagatgttagacgcttcattaggggtatacttctataaggtttcttaatcagtccatcattggttgcgtcaagaactactatcggatgttgttgggtatctctagtgttacacatggccttactaaagtttgggtaaataactatgatatctctattaattatagatgcatatatttcattcgtcaaggatattagtatcgacttgctatcgtcattaatacgtgtaatgtaatcatataaatcatgcgatagccaaggaaaattcaaatagatgttcatcatataatcgtcgctataattcatattaatactttgacattgactaatttgtaatatagcctcgccacgaagaaagctctcgtattcagtttcatcgataaaggataccgttaaatataactggttgccgatagtctcatagtctattaagtggtaagtttcgtacaaatacagaatccctaaaatattatctaatgttggattaatctttaccataactgtataaaatggagacggagtcataactattttaccgtttgtacttactggaatagatgaaggaataatctccggacatgctggtaaagacccaaatgtctgtttgaagaaatccaatgttccaggtcctaatctcttaacaaaaattacgatattcgatcccgatatcctttgcattctatttaccagcatatcacgaactatattaagattatctatcatgtctattctcccaccgttatataaatcgcctccgctaagaaacgttagtatatccatacaatggaatacttcatttctaaaatagtattcgttttctaattctttaatgtgaaatcgtatactagaaagggaaaaattatctttgagttttccgttagaaaagaaccacgaaactaatgttctgattgcgtccgattccgttgctgaattaatggatttacaccaaaaactcatataacttctagatgtagaagcattcgctaaaaaattagtagaatcaaaggatataagtagatgttccaacaagtgagcaattcccaagatttcatctatatcattctcgaatccgaaattagaaattcccaagtagatatcctttttcatccgatcattgatgaaaatacgaactttattcggtaagacaatcatttactaaggagtaaaataggaagtaatgttcgtatgtcgttatcatcgtataaattaaaggtgtgttttttaccattaagtgacattataattttaccaatattggaattataatataggtgtatttgcgcactcgcgacggttgatgcatcggtaaatatagctgtatctaatgttctagtcggtatttcatcatttcgctgtctaataatagcgttttctctatctgtttccattacagctgcctgaagtttattggtcggataatatgtaaaataataagaaatacatacgaataacaaaaataaaataagatataataaagatgccatttagagatctaattttgttcaacttgtccaaattcctacttacagaagatgaggaatcgttggagatagtgtcttccttatgtagaggatttgaaatatcttatgatgacttgataacttactttccagataggaaataccataaatatatttctaaagtatttgaacatgtagatttatcggaggaattaagtatggaattccatgatacaactttgcgagatttagtttatcttagattgtacaagtattccaagtgtatacggccgtgttataaattaggagataatctaaaaggcatagttgttataaaggacaggaatatttatattagggaagcaaatgatgacttgatagaatatctcctcaaggaatacactcctcagatttatacatattctaatgagcgcgtccccataactggttcaaaattaattctttgtggattttctcaagttacatttatggcgtatacaacgtcgcatataacaacaaataaaaaggtagatgttctcgtttccaaaaaatgtatagatgaactagtcgatccaataaattatcaaatacttcaaaatttatttgataaaggaagcggaacaataaacaaaatactcaggaagatattttattcggtaacaggtggccaaactccataggtagctttttctatttcggattttagaatttccaaattcaccagcgatttatcggttttggtgaaatccaaggatttattaatgtccacaaatgccatttgttttgtctgtggattgtatttgaaaatggaaacgatgtagttagatagatgcgctgcgaagtttcctattagggttccgcgcttcacgtcacccagcatacttgaatcaccatcctttaaaaaaaatgataagatatcaacatggagtatatcatactcggattttaattcttctactgcatcactgacattttcacaaatactacaatacggtttaccgaaaataatcagtacgttcttcatttatgggtatcaaaaacttaaaatcgttactgctggaaaataaatcactgacgatattagatgataatttatacaaagtatacaatggaatatttgtggatacaatgagtatttatatagccgtcgccaattgtgtcagaaacttagaagagttaactacggtattcataaaatacgtaaacggatgggtaaaaaagggagggcatgtaaccctttttatcgatagaggaagtataaaaattaaacaagacgttagagacaagagacgtaaatattctaaattaaccaaggacagaaaaatgctagaattagaaaagtgtacatccgaaatacaaaatgttaccggatttatggaagaagaaataaaggcagaaatgcaattaaaaatcgataaactcacatttcaaatatatttatctgattctgataacataaaaatatcattgaatgagatactaacacatttcaacaataatgagaatgttacattattttattgtgatgaacgagacgcagaattcgttatgtgtctcgaggctaaaacacatttctctaccacaggagaatggccgttgataataagtaccgatcaggatactatgctatttgcatctactgataatcatcctaagatgataaaaaacttaactcaactgtttaaatttgttccctcggcagaggataactatttagcaaaattaacggcgttagtgaatggatgtgatttctttcctggactctatggggcatctataacacccaacaacttaaacaaaatacaattgtttagtgattttacaatcgataatatagtcactagtttggcaattaaaaattattatagaaagactaactctaccgtagacgtgcgtaatattgttacgtttataaacgattacgctaatttagacgatgtctactcgtatgttcctccttgtcaatgcactgttcaagaatttatattttccgcattagatgaaaaatggaacaattttaaatcatcttatttagagaccgttccgttaccctgtcaattaatgtacgcgttagaaccacgcaaggagattgatgtttcagaagttaaaactttatcatcttatatagatttcgaaaatactaaatcagatatcgatgttataaaatctatatcctcgatcttcggatattctaacgaaaactgtaacacgatagtattcggcatctataaggataatttactactgagtataaataattcattttactttaacgatagtctgttaataaccaatactaaaagtgataatataataaatataggttactagattaaaaatggtgttccaactcgtgtgctctacatgcggtaaagatatttctcacgaacgatataaattgattatacgaaaaaaatcattaaaggatgtactcgtcagtgtaaagaacgaatgttgtaggttaaaattatctacacaaatagaacctcaacgtaacttaacagtgcaacctctattggatataaactaatatggatccggttaattttatcaagacatatgcgcctagaggttctattatttttattaattataccatgtcattaacaagtcatttgaatccatcgatagaaaaacatgtgggtatttattatggtacgttattatcggaacacttggtagttgaatctacctatagaaaaggagttcgaatagtcccattggatagtttttttgaaggatatcttagtgcaaaagtatacatgttagagaatattcaagttatgaaaatagcagctgatacgtcattaactttattgggtattccgtatggatttggtcataatagaatgtattgttttaaattggtagctgactgttataaaaatgccggtgttgaaacatcgtctaaacgaatattaggtaaagatatttttctgagccaaaacttcacagacgataatagatggataaagatatatgattctaataatttaacattttggcaaattgattaccttaaagggtgagttaatatgcataactactcctccgttgttttttccctcgttctttttcttaacgttgtttgccatcactctcataatgtaaagatattctaaaatggtaaacttttgcatatcggacgcagaaattggtataaatgttgtaattgtattatttcccgtcaatggactagtcacagctccatcagttttatatcctttagagtatttctcactcgtgtctagcattctagagcattccatgatctgtttatcgttgatattggccggaaagatagattttttattttttattatattactattggcaattgtagatataacttctggtaaatatttttctaccttttcaatttcttctattttcaagccggctatatattctgctatattgttgctagtatcaataccttttctggctaagaagtcatatgtggtattcactatatcagttttaactggtagttccattagcctttccacttctgcagaataatcagaaattggttctttaccagaaaatccagctactataataggctcaccgatgatcattggcaaaatcctatattgtaccagattaatgagagcatatttcatttccaataattctgctagttcttgagacattgatttatttgatgaatctagttggttctctagatactctaccatttctgccgcatacaataacttgttagataaaatcagggttatcaaagtgtttagcgtggctagaatagtgggcttgcatgtattaaagaatgcggtagtatgagtaaaccgttttaacgaattatatagtctccagaaatctgtggcgttacatacatgagccgaatgacatcgaagattgtccaatatttttaatagctgctctttgtccattatttctatatttgactcgcaacaattgtagataccattaatcactgattcctttttcgatgccggacaatagcacaattgtttagctttggactctatgtattcagaattaatagatatatctcttaatacagattgcactatacattttgaaactatgtcaaaaattgtagaacgacgctgttctgcagccatttaactttaaataatttacaaaaatttaaaatgagcatccgtataaaaatcgataaactgcgccaaattgtggcatatttttcagagttcagtgaagaagtgtctataaatgtagactcgacggatgagttaatgtatatttttgccgccttgggcggatctgtaaacatttgggccattatacctctcagtgcatcagtgttctaccgaggagccgaaaacattgtgtttaatcttcctgtgtccaaggtaaaatcgtgtttgtgtagttttcacaatgatgccatcatagatatagaacctgatctggaaaataatctagtaaaactttctagttatcatgtagtaagtgtcgattgtaataaggaactgatgcctattaggacagatactactatttgtctaagtatagatcaaaagaaatcttatgtgtttaattttcacaagtatgaagaaaaatgttgtggtagaaccgtcattcatttagaatggttgttgggctttatcaagtgtattagtcagcatcagcatctggctattatgtttaaagatgacaatattattatgaagactcctggtaatactgatgcattttccagggaatattctatgactgaatgttctcaagaactacaaaagttttctttcaaaatagctatctcgtctctcaacaaactacgaggattcaaaaagagagtcaatgtttttgaaactagaatcgtaatggataatgacgataacattctaggaatgttgttttcggatagagttcaatcctttaagatcaacatctttatggcgtttttagattaatactttcaatgagataaatatgggtggcggagtaagtgttgagctccctaaacgggatccgcctccgggagtacccactgatgagatgttattaaacgtggataaaatgcatgacgtgatagctcccgctaagcttttagaatatgtgcatataggaccactagcaaaagataaagaggataaagtaaagaaaagatatccagagtttagattagtcaacacaggacccggtggtctttcggcattgttaagacaatcgtataatggaaccgcacccaattgctgtcgcacttttaatcgtactcattattggaaaaaggatggaaagatatcagataagtatgaagagggtgcagtattagaatcgtgttggccagacgttcacgacactggaaaatgcgatgttgatttattcgactggtgtcagggggatacgttcgatagaaacatatgccatcagtggatcggttcagcctttaataggagtaatagaactgtagagggtcaacaatcgttaataaatctgtataataagatgcaaacattatgtagtaaagatgctagtgtaccaatatgtgaatcatttttgcatcatttacgcgcacacaatacagaagatagcaaagagatgatcgattatattctaagacaacagtctgcggactttaaacagaaatatatgagatgtagttatcccactagagataagttagaagagtcattaaaatatgcggaacctcgagaatgttgggatccagagtgttcgaatgccaatgttaatttcttgctaacacgtaattataataatttaggactttgcaatattgtacgatgtaatactagcgtgaacaacttacagatggataaaacttcctcattaagattgtcatgtggattaagcaatagtgatagattttctactgttcccgtcaatagagcaaaagtagttcaacataatattaaacactcgttcgacctaaaattgcatttgatcagtttattatctctcttggtaatatggatactaattgtagctatttaaatgggtgccgcagcaagcatacagacgacggtgaatacactcagcgaacgtatctcgtctaaattagaacaagaagcgaatgctagtgctcaaacaaaatgtgatatagaaatcggaaatttttatatccgacaaaaccatggatgtaacctcactgttaaaaatatgtgctctgcggacgcggatgctcagttggatgctgtgttatcagccgctacagaaacatatagtggattaacaccggaacaaaaagcatacgtgccagctatgtttactgctgcgttaaacattcagacgagtgtaaacactgttgttagagattttgaaaattatgtaaaacaaacttgtaattctagcgcggtcgtcgataacaaattaaagatacaaaacgtaatcatagatgaatgttacggagccccaggatctccaacaaatttggaatttattaatacaggatctagcaaaggaaattgtgccattaaggcgttgatgcaattgactactaaggccactactcaaatagcacctagacaagttgctggtacaggagttcagttttatatgattgttatcggtgttataatattggcagcgttgtttatgtactatgccaagcgtatgctgttcacatccaccaatgataaaatcaaacttattttagccaataaggaaaacgtccattggactacttacatggacacattctttagaacttctccgatggttattgctaccacggatatgcaaaactgaaaatatattgataatattttaatagattaacatggaagttatcgctgatcgtctagacgatatagtgaaacaaaatatagcggatgaaaaatttgtagattttgttatacacggtctagagcatcaatgtcctgctatacttcgaccattaattaggttgtttattgatatactattatttgttatagtaatttatatttttacggtacgtctagtaagtagaaattatcaaatgttgttggcgttggtggcgctagtcatcacattaactattttttattactttatactataatagtactagactgacttctaacaaacatctcacctgccataaataaatgcttgatattaaagtcttctatttctaacactattccatctgtggaaaataatactctgacattatcgctaattgacacatcggtgagtgatatgcctataaagtaataatcttctttgggcacatataccagtgtaccaggttctaacaacctatttactggtgctcctgtagcatactttttctttaccttgagaatatccatcgtttgcttggtcaatagcgatatgtgattttttatcaaccactcgaaaaagtaattggagtgttcatatcctctacgggctattgtctcatggccgtgtatgaaatttaagtaacacgactgtggtagatttgttctatagagccggttgccgcaaatagatagaactaccaatatgtctgtacaaatgttaaacattaattgattaacagaaaaaacaatgttcgttctgggaatagaaaccagatcaaaacaaaattcgttagaatatatgccacgtttatacattgaatataaaataactacagtttgaaaaataacagtatcatttaaacatttaacttgcggggttaatttcacaactttactgtttttaaactgttcaaaatatagcatcgatccatgagaaatacgtttagccgcctttaatagaggaaatcccaccgcctttctggatctcaccaacgacgatagttctgaccagcaactcatttcttcatcatccacctgttttaacatataataggcaggagatagatatccgtcattgcaatattccttttcgtaggcacacaatctaatattgataaaatctccattctcttctctgcatttattatcttgtttcggtggctgattaggctgtagtcttggtttaggccttggtctatcgttgttgaatctattttggtcattaaatctttcatttcttcctggtatatttctatcacctcgtttggttggatttttgtctatattatcgtttgtaacatcggtacgggtattcatttatcacaaaaaaaacttctctaaatgagtctactgctagaaaacctcatcgaagaagataccatattttttgcaggaagtatatctgagtatgatgatttacaaatggttattgccggcgcaaaatccaaatttccaagatctatgctttctatttttaatatagtacctagaacgatgtcaaaatatgagttggagttgattcataacgaaaatatcacaggagcaatgtttaccacaatgtataatataagaaacaatttgggtctaggagatgataaactaactattgaagccattgaaaactatttcttggatcctaacaatgaagttatgcctcttattattaataatacggatatgactgccgtcattcctaaaaaaagtggtaggagaaagaataagaacatggttatcttccgtcaaggatcatcacctatcttgtgcattttcgaaactcgtaaaaagattaatatttataaagaaaatatggaatccgcatcgactgagtatacacctatcggagacaacaaggctttgatatctaaatatgcgggaattaatgtcctgaatgtgtattctccttccacatccatgagattgaatgccatttacggattcaccaataaaaataaactagagaaacttagtactaataaggaactagaatcgtatagttctagccctcttcaagaacccattaggttaaatgattttctgggactattggaatgtgttaaaaagaatattcctctaacagatattccgacaaaggattgattactataaatggagaatgttcctaatgtatactttaatcctgtgtttatagagcccacgtttaaacattctttattaagtgtttataaacacagattaatagttttatttgaagtattcgttgtattcattctaatatatgtattttttagatctgaattaaatatgttcttcatgcctaaacgaaaaatacccgatcctattgatagattacgacgtgctaatctagcgtgtgaagacgataaattaatgatctatggattaccatggatgacaactcaaacatctgcgttatcaataaatagtaaaccgatagtgtataaagattgtgcaaagcttttgcgatcaataaatggatcacaaccagtatctcttaacgatgttcttcgcagatgatgattcattttttaagtatttggctagtcaagatgatgaatcttcattatctgatatattgcaaatcactcaatatctagactttctgttattattattgatccaatcaaaaaataaattagaagccgtgggtcattgttatgaatctctttcagaggaatacagacaattgacaaaattcacagactctcaagattttaaaaaactgtttaacaaggtccctattgttacagatggaagggtcaaacttaataaaggatatttgttcgactttgtgattagtttgatgcgattcaaaaaagaatcctctctagctaccaccgcaatagatcctattagatacatagatcctcgtcgcgatatcgcattttctaacgtgatggatatattaaagtcgaataaagtgaacaataattaattctttattgtcatcatgaacggcggacatattcagttgataatcggccccatgttttcaggtaaaagtacagaattaattagacgagttagacgttatcaaatagctcaatataaatgcgtgactataaaatattctaacgataatagatacggaacgggactatggacgcatgataagaataattttgaagcattggaagcaactaaactatgtgatgtcttggaatcaattacagatttctccgtgataggtatcgatgaaggacagttctttccagacattgttgaattctgtgagcgtatggcaaacgaaggaaaaatagttatagtagccgcactcgatgggacatttcaacgtaaaccgtttaataatattttgaatcttattccattatctgaaatggtggtaaaactaactgctgtgtgtatgaaatgctttaaggaggcttccttttctaaacgattgggtgaggaaaccgagatagaaataataggaggtaatgatatgtatcaatcggtgtgtagaaagtgttacatcgactcataatattatattttttatctaaaaaactaaaaataaacattgattaaattttaatataatacttaaaaatggatgttgtgtcgttagataaaccgtttatgtattttgaggaaattgataatgagttagattacgaaccagaaagtgcaaatgaggtcgcaaaaaaactgccgtatcaaggacagttaaaactattactaggagaattattttttcttagtaagttacagcgacacggtatattagatggtgccaccgtagtgtatataggatcggctcctggtacacatatacgttatttgagagatcatttctataatttaggaatgattatcaaatggatgctaattgacggacgccatcatgatcctattctaaatggattgcgtgatgtgactctagtgactcggttcgttgatgaggaatatctacgatccatcaaaaaacaactgcatccttctaagattattttaatttctgatgtaagatccaaacgaggaggaaatgaacctagtacggcggatttactaagtaattacgctctacaaaatgtcatgattagtattttaaaccccgtggcatctagtcttaaatggagatgcccgtttccagatcaatggatcaaggacttttatatcccacacggtaataaaatgttacaaccttttgctccttcatattcagctgaaatgagattattaagtatttataccggtgagaacatgagactgactcgagttaccaaatcagacgctgtaaattatgaaaaaaagatgtactaccttaataagatcgtccgtaacaaagtagttgttaactttgattatcctaatcaggaatatgactattttcacatgtactttatgctgaggaccgtgtactgcaataaaacatttcctactactaaagcaaaggtactatttctacaacaatctatatttcgtttcttaaatattccaacaacatcaactgaaaaagttagtcatgaaccaatacaacgtaaaatatctagcaaaaattctatgtctaaaaacagaaatagcaagagatccgtacgcggtaataaatagaaacgtactactgagatatactaccgatatagagtataatgatttagttactttaataaccgttagacataaaattgattctatgaaaactgtgtttcaggtatttaacgaatcatccataaattatactccggttgatgatgattatggagaaccaatcattataacatcgtatcttcaaaaaggtcataacaagtttcctgtaaattttctatacatagatgtggtaatatctgacttatttcctagctttgttagactagatactacagaaactaatatagttaatagtgtactacaaacaggcgatggtaaaaagactcttcgtcttcccaaaatgttagagacggaaatagttgtcaagattctctatcgccctaatataccattaaaaattgttagatttttccgcaataacatggtaactggagtagagatagccgatagatctgttatttcagtcgctgattaatcaattagtagagatgagataagaacattataataatcaataatatatcttatatcttatatcttatatcttgtttagaaaaatgctaatattaaaatagctaacgctagtaatccaatcggaagccatttgatatctataatagggtatctaatttcctgatttaaatagcggacagctatattctcggtagctactcgtttggaatcacaaacattatttacatctaatttactatctgtaatggaaacgtttcccaatgaaatggtacaatccgatacattgcattttgttatatttttttttaaagaggctggtaacaacgcatcgcttcgtttacatggctcgtaccaacaataatagggtaatcttgtatctattcctatccgtactatgcttttatcaggataaatacatttacatcgtatatcgtctttgttagcatcacagaatgcataaatttgttcgtccgtcatgataaaaatttaaagtgtaaatataactattatttttatagttgtaataaaaagggaaatttgattgtatactttcggttctttaaaagaaactgacttgataaaaatggctgtaatctctaaggttacgtatagtctatatgatcaaaaagagattaatgctacagatattatcattagtcatgttaaaaatgacgacgatatcggtaccgttaaagatggtagactaggtgctatggatggggcattatgtaagacttgtgggaaaacggaattggaatgtttcggtcactggggtaaagtaagtatttataaaactcatatagttaagcctgaatttatttcagaaattattcgtttactgaatcatatatgtattcactgcggattattgcgttcacgagaaccgtattccgacgatattaacctaaaagagttatcgggacacgctcttaggagattaaaggataaaatattatccaagaaaaagtcatgttggaacagcgaatgtatgcaaccgtatcaaaaaattactttttcaaagaaaaaggtttgtttcgtcaacaagttggatgatattaacgttcctaattctctcatctatcaaaagttaatttctattcatgaaaagttttggccattattagaaattcatcaatatccagctaacttattttatacagactactttcccatccctccgctgattattagaccggctattagtttttggatagatagtatacccaaagagaccaatgaattaacttacttattaggtatgatcgttaagaattgtaacttgaatgctgatgaacaggttatccagaaggcggtaatagaatacgatgatattaaaattatttctaataacacttccagtatcaatttatcatatattacatccggcaaaaataatatgattagaagttatattgtcgcccgacgaaaagatcagaccgctagatctgtaattggtcccagtacatctatcaccgttaatgaggtaggaatgcccgcatatattagaaatacacttacagaaaagatatttgttaatgcctttacagtggataaagttaaacaactattagcgtcaaaccaagttaaattttactttaataaacgattaaaccaattaacaagaatacgccaaggaaagtttattaaaaataaaatacatttattgcctggtgattgggtagaagtagctgttcaagaatatacaagtattatttttggaagacagccgtctctacatagatacaacgtcatcgcttcatctatcagagctaccgaaggagatactatcaaaatatctcccggaattgccaactctcaaaatgctgatttcgacggagatgaagaatggatgatattggagcaaaatcctaaagccgtaattgaacaaagtattcttatgtatccgacgacgttactcaaacacgatattcatggagcccccgtttatggatctattcaagatgaaatcgtagcagcgtattcattgtttagaatacaagatctttgtttagatgaagtattgaacatcttggggaaatatggaagaaagttcgatcctaaaggtaaatgtaaattcagcggtaaagatatctatacttacttgataggtgaaaagattaattatccgggtctcttaaaggatggtgaaattattgcaaacgacgtagatagtaattttgttgtggctatgaggcatctgtcattggctggactcttatccgatcataagtcgaacgtggaaggtatcaactttattatcaagtcatcttatgtttttaagagatatctatctatttacggttttggggtgacattcaaagatctgagaccaaattcgacgttcactaataaattggaggccatcaacgtagaaaaaatagaacttatcaaagaagcatacgccaaatatctcaacgatgtaagagacgggaaaatagttccattatctaaagctttagaggcggactatgtggaatccatgttatccaacttgacaaatcttaatatccgagagatagaagaacatatgagacaaacgctgatagatgatccagataataacctcctgaaaatggccaaagcgggttataaagtaaatcccacagaactaatgtatattctaggtacttatggacaacagaggattgatggtgaaccagcagagactcgagtattgggtagagtcttaccttactatcttccagactctaaggatccagaaggaagaggttatattcttaattctttaacaaaaggattaacaggttctcaatattacttttcgatgctggttgccagatctcaatctactgatatcgtctgtgaaacatcacgtaccggaacactggctagaaaaatcattaaaaagatggaggatatggtggtcgacggatacggacaagtagttataggtaatacgctcatcaagtacgccgccaattataccaaaattctaggctcagtatgtaaacctgtagatcttatctatccagatgagtccatgacttggtatttggaaattagtgctctgtggaataaaataaaacagggattcgtttactctcagaaacagaaacttgcaaaaaagacattggcgccgtttaatttcctagtattcgtcaaacccaccactgaggataatgctattaaggttaaggatctgtacgatatgattcataacgtcattgatgatgtgagagagaaatacttctttacggtatctaatatagattttatggagtatatattcttgacgcatcttaatccttctagaattagaattacaaaagaaacggctatcactatctttgaaaagttctatgaaaaactcaattatactctaggtggtggaactcctattggaattatttctgcacaggtattgtctgagaagtttacacaacaagccctgtccagttttcacactactgaaaaaagtggtgccgtcaaacaaaaacttggtttcaacgagtttaataacctgactaatttgagtaagaataagaccgaaattatcactctggtatccgatgatatctctaaacttcaatctgttaagattaatttcgaatttgtatgtttgggagaattaaatccaaacatcactcttcgaaaagaaacagataggtatgtagtagatataatagtcaatagattatacatcaagagagcagaaattaccgaattagtcgtcgaatatatgattgaacgatttatctcctttagcgtcattgtaaaggaatggggtatggagacattcattgaggacgaggataatattagatttactgtctacctaaatttcgttgaaccggaagaattgaatcttagtaagtttatgatggttcttccgggtgccgccaacaagggcaagattagtaaattcaagattcctatctctgactatacgggatatgacgacttcaatcaaacaaaaaagctcaataagatgactgtagaactcatgaatctaaaagaattgggttctttcgatttggaaaacgtcaacgtgtatcctggagtatggaatacatacgatatcttcggtatcgaggccgctcgtgaatacttgtgcgaagccatgttaaacacctatggagaagggttcgattatctgtatcagccttgtgatcttctcgctagtttactatgtgctagttacgaaccagaatcagtgaataaattcaagttcggcgcagctagtactcttaagagagctacgttcggagacaataaagcattgttaaacgcggctcttcataaaaagtcagaacctattaacgataatagtagctgccacttttttagcaaggtccctaatataggaactggatattacaaatactttatcgacttgggtcttctcatgagaatggaaaggaaactatctgataagatatcttctcaaaagatcaaggaaatggaagaaacagaagacttttaattcttatcaataacatatttttctatgatctgtcttttaaacgatggattttccacaaatgcgcctctcaagtccctcatagaatgatacacgtataaaaaatatagcataggcgatgactccttatttttagacattagatatgccaaaatcatagccccgcttctatttactcccgcagcacaatgaaccaacacgggctcgtttcgttgatcacatttagataaaaaggcggtcacgtcgtcaaaatatttactaatatcggtagttgtatcatctaccaacggtatatgaataatattaatattagagttaggcaatgtatatttatccatcgtcaaatttaaaacatatttgaacttaacttcagatgatggtgcatccatagcatttttataatttcccaaatacacattattggttacccttgtcattatagtgggagatttggctttgtgcatatctccagttgaacgtagtagtaagtatttatacaaacttttcttatccatttataacgtacaaatggataaaactactttatcggtaaacgcgtgtaatttagaatacgttagagaaaaggctatagtaggcgtacaagcagccaaaacatcaacacttatattctttgttattatattggcaattagtgcgctattactctggtttcagacgtctgataatccagtctttaatgaattaacgagatatatgcgaattaaaaatacggttaacgattggaaatcattaacggatagcaaaacaaaattagaaagtgatagaggtaaacttctagccgctggtaaggatgatatattcgaattcaaatgtgtggatttcggcgcctattttatagctatgcgattggataagaaaacatatctgccgcaagctattaggcgaggtactggagacgcgtggatggttaaaaaggcggcaaaggtcgatccatctgctcaacaattttgtcagtatttgataaaacacaagtctaataatgttattacttgtggtaatgagatgttaaatgaattaggttatagcggttattttatgtcaccgcattggtgttccgattttagtaatatggaatagtgttagataaatgcggtaacaaatgttcctgtaaggaaccataacagcttagatttaacgttaaagatgagcataaacataataaacaaaattacaatcaaacctataacattaatatcaaacaatccaaaaaatgaaatcagtggagtagtaaacgcgtacataactcctggataacgtttagcagctgccgttcctattctagaccaaaaattcggtttcatgttttcgaagcggtgttctgcaacaagtcggggatcgtgttctacatatttggcggcattatccagtatctgcctattgatcttcatttcgttttcgattctggctatttcaaaataaaatcccgatgatagacctccagactttataatttcatctacgatgttcagcgccgtagtaactctaataatataggctgataagctaacatcataccctcctgtatatgtgaatatggtatgatttttgtccattacaagctcggttttaactttattgcctgtaataatttctctcatctgtaggatatctatttttttgtcatgcattgccttcaagacgggacgaagaaacgtaatatcctcaataacgttatcgttttctacaataactacatattctacctttttattttctaactcggtaaaaaaattagaatcccatagggctaaatgtctagcgatatttcttttcgtttcctctgtacacatagtgttacaaaaccctgaaaagaagtgagtatacttgtcatcatttctaatgtttcctccagtccactgtataaacgcataatccttgtaatgatctggatcatccttgactaccacaacatttcttttttctggcataacttcgttgtcctttacatcatcgaacttctgatcattaatatgctcatgaacattaggaaatgtttctgatggaggtctatcaataactggcacaacaataacaggagttttcaccgccgccatttagttattgaaattaatcatatacaactctttaatacgagttatattttcgtctatccattgtttcacatttacatatttcgacaaaaagatataaaatgcgtattccaatgcttctctgtttaatgaattactaaaatatacaaacacgtcactgtctggcaataaatgatatcttagaatattgtaacaatttattttgtattgcacatgttcgtgatctatgagttcttcttcgaatggcataggatctccgaatctgaaaacgtataaataggagttagaataataatatttgagagtattggtaatatataaactctttagcggtataattagtttttttctctcaatttctatttttagatgtgatggaaaaatgactaattttgtagcattagtatcatgaactctaatcaaaatcttaatatcttcgtcacacgttagctctttgaagtttttaagagatgcatcagttggttctacagatggagtaggtgcaacaattttttgttctacacatgtatgtactggagccattgttttaactataatggtgcttgtatcgaaaaactttaatgcagatagcggaagctcttcgccgcgactttctacatcgtaattgggttctaacgccgatctctgaatggatactagttttctaagttctaatgtgattctctgaaaatgtaaatccaattcctccggcattatagatgtgtatacatcggtaaataaaactatagtatccaacgatcccttctcgcaaattctagtcttaaccaaaaaatcgtatataaccacggagatggcgtatttaagagtggattcttctaccgttttgttcttggatgtcatataggaaactataaagtccgcactactgttaagaatgattactaacgcaactatatagttcaaattaagcattttggaaacataaaataactctgtagacgatacttgactttcgaataagtttgcagacaaacgaagaaagaacagacctctcttaatttcagaagaaaactttttttcgtattcctgacgtctagagtttatatcaataagaaagttaagaattagtcggttaatgttgtatttcattacccaagtttgagatttcataatattatcaaaagacatgataatattaaagataaagcgctgactatgaacgaaatagctatatggttcgctcaaaaatatagtcttgttaaacgtggaaacgataactgtatttttaatcacgtcagcggcatctaaattaaatataggtatatttattccacacactctacaatatgccacaccatcttcataataaataaattcgttagcaaaattattaattttagtgaaatagttagcgtcaactttcatagcttccttcaatctaatttgatgctcacacggtgcgaattctactctaacatcccttttccatgcctcaggttcatcgatctctataatatctagttttttgcgtttcacaaacacaggctcgtctctcgcgatgagatctgtatagtaactatgtaaatgataactagatagaaagatgtagctatatagatgacgatcctttaagagaggtataataactttaccccaatcagatagactgttgttatggtcttcggaaaaagaatttttataaatttttccagtattttccaaatatacgtacttaacatctaaaaaatccttaatgataataggaatggataatccgtctattttataaagaaatacatatcgcacattatacttttttttggaaatgggaataccgatgtgtctacataaatatgcaaagtctaaatattttttagagaatcttagttggtccaaattcttttccaagtacggtaatagatttttcatattgaacggtatcttcttaatctctggttctagttccgcattaaatgatgaaactaagtcactatttttataactaacgattacatcacctctaacatcatcatttaccagaatactgatcttcttttgtcgtaaatacatgtctaatgtgttaaaaaaaagatcatacaagttatacgtcatttcatctgtggtattcttgtcattgaaggataaactcgtactaatctcttctttaacagcctgttcaaatttatatcctatatacgaaaaaatagcaaccagtgtttgatcatccgcgtcaatattctgttctatcgtagtgtataacaatcgtatatcttcttctgtgatagtcgatacgttataaaggttgataacgaaaatatttttatttcgtgaaataaagtcatcgtaggattttggacttatattcgcgtctagtagatatgcttttatttttggaatgatctcaattagaatagtctctttagagtccatttaaagttacaaacaactaggaaattggtttatgatgtataatttttttagtttttatagattctttattctatacttaaaaaatgaaaataaatacaaaggttcttgagggttgtgttaaattgaaagcgagaaataatcataaattatttcattatcgcgatatccgttaagtttgtatcgtaatggcgtggtcaattacaaataaagcggatactagtagcttcacaaagatggctgaaatcagagctcatctaaaaaatagcgctgaaaataaagataaaaacgaggatattttcccggaagatgtaataattccatctactaagcccaaaaccaaacgagccactactcctcgtaaaccagcggctactaaaagatcaaccaaaaaggaggaagtggaagaagaagtagttatagaggaatatcatcaaacaactgaaaaaaattctccatctcctggagtcggcgacattgtagaaagcgtggctgctgtagagctcgatgatagcgacggggatgatgaacctatggtacaagttgaagctggtaaagtaaatcatagtgctagaagcgatctttctgacctaaaggtggctaccgacaatatcgttaaagatcttaagaaaattattactagaatctctgcagtatcgacggttctagaggatgttcaagcagctggtatctctagacaatttacttctatgactaaagctattacaacactatctgatctagtcaccgagggaaaatctaaagttgttcgtaaaaaagttaaaacttgtaagaagtaaatgcgtgcacttttttataaagatggtaaactctttaccgataataattttttaaatcctgtatcagacgataatccagcgtatgaggttttgcaacatgttaaaattcctactcatttaacagatgtagtagtatatgaacaaacgtgggaagaggcattaactagattaatttttgtgggaagcgattcaaaaggacgtagacaatacttttacggaaaaatgcatgtacagaatcgcaacgctaaaagagatcgtatttttgttagagtatataacgttatgaaacgaattaattgttttataaacaaaaatataaagaaatcgtccacagattccaattatcagttggcggtttttatgttaatggaaactatgttttttattagatttggtaaaatgaaatatcttaaggagaatgaaacagtagggttattaacactaaaaaataaacacatagaaataagtcccgatgaaatagttatcaagtttgtaggaaaggacaaagtttcacatgaatttgttgttcataagtctaatagactatataaaccgctattgaaactgacggatgattctagtcccgaagaatttctgttcaacaaactaagtgaacgaaaggtatacgaatgtatcaaacagtttggtattagaatcaaggatctccgaacgtatggagtcaattatacgtttttatataatttttggacaaatgtaaagtccatatctcctcttccgtcaccaaaaaagttaatagcgttaactatcaaacaaactgctgaagtggtaggtcatactccatcaatttcaaaaagagcttacatggcaacgactattttagaaatggtaaaggataaaaattttttagatgtagtatctaaaactacgttcgatgaattcctatctatagtcgtagatcacgttaaatcatctacggatggatgatatagatctttacacaaataattacaagaccgataaatggaaatggataagcgtataaaatctctcgcaatgacagctttcttcggagagctaaacacattagatattatggcattgataatgtctatatttaaacgccatccaaacaataccattttttcagtggataaggatggtcagtttatgattgatttcgaatacgataattataaggcttctcaatatttggatctgaccctcactccgatatctggagatgaatgcaagactcacgcatcgagtatagccgaacaattggcgtgtgcggatattattaaagaggatattagcgaatatatcaaaactactccccgtcttaaacgatttataaaaaaataccgcaatagatcagatactcgcatcagtcgagatacagaaaagcttaaaatagctctagctaaaggcatagattacgaatatataaaagacgcttgttaataagtaaatgaaaaaaaactagtcgtttataataaaacacgatatggatgccaacgtagtatcatcttctactattgcaacgtatatagacgctttagcgaagaatgcttcagaattagaacagaggtctaccgcatacgaaataaataatgaattggaactagtatttattaagccgccattaattactttgacaaatgtagtgaatatctctacgattcaggaatcgtttattcgatttaccgttactaataaggaaggtgttaaaattagaactaagattccattatctaaggtacatggtctagatgtaaaaaatgtacagttagtagatgctatagataacatagtttgggaaaagaaatcattagtgacggaaaatcgtcttcacaaagaatgcttgttgagactatcgacagaggaacgtcatatatttttggattacaagaaatatggatcctctatccgactagaattagtcaatcttattcaagcaaaaacaaaaaactttacgatagactttaagctaaaatattttctaggatccggtgcccagtctaaaagttctttattacacgctattaatcatccaaagtcaaggcctaatacatctctggaaatagaattcacacctagagacaatgaaaaagttccatatgatgaactaataaaggaattgacgactctatcacgtcatatatttatggcttctccagagaatgtaattctttctccgcctattaacgcacctataaagacttttatgttgcctaaacaagatatagtaggtctggatctggaaaatctatacgctgtaactaagactgacggcattcctataactatcagagttacatcaaacgggttgtattgttattttacacatcttggttatattattagatatcctgttaagagaataatagattccgaagtagtagtctttggtgaggcagttaaggataagaactggaccgtatatctcattaagctaatagagcctgtgaatgcaatcaatgatagactagaagaaagtaagtatgttgaatctaaactagtggatatttgtgatcggatagtattcaagtcaaagaaatacgaaggtccgtttactacaactagtgaagtcgtcgatatgttatctacatatttaccaaagcaaccagaaggtgttattctgttctattcaaagggacctaaatctaacattgattttaaaattaaaaaggaaaatactatagaccaaactgcaaatgtagtatttaggtacatgtccagtgaaccaattatctttggagaatcgtctatctttgtagagtataagaaatttagcaacgataaaggctttcctaaagaatatggttctggtaagattgtgttatataacggcgttaattatctaaataatatctattgtttggaatatattaatacacataatgaagtgggtattaagtccgtggttgtacctattaagtttatagcagaattcttagttaatggagaaatacttaaacctagaatcgataaaaccatgaaatatattaactcagaagattattatggaaatcaacataatatcatagtcgaacatttaagagatcaaagcatcaaaataggagatatctttaacgaggataaactatcggatgtgggacatcaatacgccaataatgataaatttagattaaatccagaagttagttattttacgaataaacgaactagaggaccgttgggaattttatcaaactacgtcaagactcttcttatttctatgtattgttccaaaacatttttagacgattccaacaaacgaaaggtattggcgattgattttggaaacggtgctgacctggaaaaatacttttatggagagattgcgttattggtagcgacggatccggatgctgatgctatagctagaggaaatgaaagatacaacaaattaaactctggaattaaaaccaagtactacaaatttgactacattcaggaaactattcgatccgatacatttgtctctagtgtcagagaagtattctattttggaaagtttaatatcatcgactggcagtttgctatccattattcttttcatccgagacattatgctaccgtcatgaataacttatccgaactaactgcttctggaggcaaggtattaatcactaccatggacggagacaaattatcaaaattaacagataaaaagacttttataattcataagaatttacctagtagcgaaaactatatgtctgtagaaaaaatagctgatgatagaatagtggtatataatccatcaacaatgtctactccaatgactgaatacattatcaaaaagaacgatatagtcagagtgtttaacgaatacggatttgttcttgtagataacgttgatttcgctacaattatagaacgaagtaaaaagtttattaatggcgcatctacaatggaagatagaccgtctacaaaaaactttttcgaactaaatagaggagccattaaatgtgaaggtttagatgtcgaagacttacttagttactatgttgtttatgtcttttctaagcggtaaataataatatggtatgggttctgatatccccgttctaaatgcattaaataattccaatagagcgatttttgttcctataggaccttccaactgtggatactctgtattgttaatagatatattaatacttttgtcgggtaacagaggttctacgtcttctaaaaataaaagtttgataacatctggcctgttcataaataaaaacttggcgattctatatatactcttattatcaaatctagccattgtcttatagatgtgagctactgtaggtgtaccatttgattttctttctaatactatatatttctctcgaagaagttcttgcacatcatctgggaataaaatactactgttgagtaaatcagttattttttttatatcgatattgatggacatttttatagttaaggataataagtatcccaaagtcgataacgacgataacgaagtatttatacttttaggaaatcacaatgactttatcagattaaaattaacaaaattaaaggagcatgtatttttttctgaatatattgtgactccagatacatatggatctttatgcgtcgaattaaatgggtctagttttcagcacggtggtagatatatagaggtggaggaatttatagatgctggaagacaagttagatggtgttctacatccaatcatatatctgaagatatacccgaagatatacacactgataaatttgtcatttatgatatatacacttttgacgctttcaagaataaacgattggtattcgtacaggtacctccgtcgttaggagatgatagtcatttgactaatccgttattgtctccgtattatcgtaattcagtagccagacaaatggtcaatgatatgatttttaatcaagattcatttttaaaatatttattagaacatctgattagaagccactatagagtttctaaacatataacaatagttagatacaaggataccgaagaattaaatctaacgagaatatgttataatagagataagtttaaggcgtttgtattcgcttggtttaacggcgtttcggaaaatgaaaaggtactagatacgtataaaaaggtatctaatttgatataatgaattcagtgactgtatcacacgcgccatatactattacttatcacgatgattgggaaccagttatgagtcaattggtagagttttataacgaagtagccagttggctgctacgagacgagacgtcgcctattcctgataagttctttatacagttgaaacaaccgcttagaaataaacgagtatgtgtgtgtggtatagatccgtatccgaaagatggaactggtgtaccgttcgaatcaccaaattttacaaaaaaatcaattaaggagatagcttcatctatatctagattaaccggagtaattgattataaaggttataaccttaatataatagacggggttataccctggaattattacttaagttgtaaattaggagaaacaaaaagtcacgcgatctactgggataagatttccaagttactgctgcagcatataactaaacacgttagtgttctttattgtttgggtaaaacagatttctcgaatatacgggcaaagttagaatccccggtaactaccatagtgggatatcatccagcggctagagaccgccaattcgagaaagatagatcatttgaaattatcaacgttttactggaattagacaacaaggtacctataaattgggctcaagggtttatttattaatgctttagtgaaattttaacttgtgttctaaatggatgcggctattagaggtaatgatgttatctttgtccttaagactataggtgtcccatcagcatgtagacaaaatgaagatccaagattcgtagaagcatttaaatgcgacgagttaaaaagatatattgataataatccagaatgtacactattcgaaagtcttagggatgaggaagcatactctatagtcagaattttcatggatgtagatttagacgcgtgtctagacgaaatagattatttaacggctattcaagattttattatcgaggtgtcaaactgtgtagctagattcgcgtttacagaatgcggtgccattcatgaaaatgtaataaaatccatgagatctaatttttcattgactaagtctacaaatagagataaaacaagttttcatattatctttttagacacgtataccactatggatacattgatagctatgaaacgaacactattagaattaagtagatcatctgaaaatccactaacaagatcgatagacactgccgtatataggagaaaaacaactcttcgggttgtaggtactaggaaaaatccaaattgcgacactattcatgtaatgcaaccaccgcatgataatatagaagattacctattcacttacgtggatatgaacaacaatagttattacttttctctacaacgacgattggaggatttagttcctgataagttatgggaaccagggtttatttcattcgaagacgctataaaaagagtttcaaaaatattcattaattctataataaactttaatgatctcgatgaaaataattttacaacggtaccactggtcatagattacgtaacaccttgtgcattatgtaaaaaacgatcgcataaacatccgcatcaactatcgttggaaaatggtgctattagaatttacaaaactggtaatccacatagttgtaaagttaaaattgttccgttggatggtaataaactgtttaatattgcacaaagaattttagacactaactctgttttattaaccgaacgaggagactatatagtttggattaataattcatggaaatttaacagcgaagaacccttgataacaaaactaattctgtcaataagacatcaactacctaaggaatattcaagcgaattactctgtccgaggaaacgaaagactgtagaagctaacatacgagacatgttagtagattcagtagagaccgatacctatccggataaacttccgtttaaaaatggtgtattggacctggtagacggaatgttttactctggagatgatgctaaaaaatatacgtgtactgtatcaaccggatttaaatttgacgatacaaagttcgtcgaagacagtccagaaatggaagagttaatgaatatcattaacgatatccaaccattaacggatgaaaataagaaaaatagagagctatatgaaaaaacattatctagttgtttatgtggtgctaccaaaggatgtttaacattcttttttggagaaactgcaactggaaagtcgacaaccaaacgtttgttaaagtctgctatcggtgacctgtttgttgagacgggtcaaacaattttaacagatgtattggataaaggacctaatccatttatcgctaacatgcatttgaaaagatctgtattctgtagcgaactacctgattttgcctgtagtggatcaaagaaaattagatctgataatattaaaaagttgacagaaccttgtgtcattggaagaccgtgtttctccaataaaattaataatagaaaccatgctacaatcattatcgatactaattacaaacctgtctttgataggatagataacgcattaatgagaagaattgccgtcgtgcgattcagaacacacttttctcaaccttctggtagagaggctgctgaaaataatgacgcgtacgataaagtcaaactattagacgaggggttagatggtaaaatacaaaataatagatatagatttgcatttctatacttgttggtgaaatggtacaaaaaatatcatgttcctattatgaaactatatcctacacccgaagagattcctgactttgcattctatctcaaaataggtactctgttagtatctagctctgtaaagcatattccattaatgacggacctctccaaaaagggatatatattgtacgataatgtggttactcttccgttgactactttccaacagaaaatatccaagtattttaattctagactatttggacacgatatagagagcttcatcaatagacataagaaatttgccaatgttagtgatgaatatctgcaatatatattcatagaggatatttcatctccgtaaatatatgctcatatatttatagaagatatcacatatctaaatgaataccggaattatagatttatttgataatcatgttgatagtataccaactatattacctcatcagttagctactctagattatctagttagaactatcatagatgagaacagaagcgtgttattgttccatattatgggatcaggtaaaacaataatcgctttgttgttcgccttggtagcttccagatttaaaaaggtttacattctagtgccgaacatcaacatcttaaaaattttcaattataatatgggtgtagctatgaacttgtttaatgacgaattcatagctgagaatatctttattcattccacaacaagtttttattctcttaattataacgataacgtcattaattataacggattatctcgctacaataactctatttttatcgttgatgaggcacataatatctttgggaataatactggagaacttatgaccgtgataaaaaataaaaacaagattccttttctactattgtctggatctcccattactaacacacctaatactctgggtcatattatagatttaatgtccgaagagacgatagattttggtgaaattattagtcgtggtaagaaagtaattcagacacttcttaacgaacgaggtgtgaatgtacttaaggatttgcttaaaggaagaatatcatattacgaaatgcctgataaagatctaccaacgataagatatcacggacgtaagtttctagatactagagtagtatattgtcacatgtctaaacttcaagagagagattatatgattactagacgacagctatgttatcatgaaatgtttgataaaaatatgtataacgtgtcaatggcagtattgggacaacttaatctgatgaataatttagatactttatttcaggaacaggataaggaattgtacccaaatctgaaaataaataatggcgtgttatacggagaagaattggtaacgttaaacattagttccaaatttaagtactttatcaatcggatacagacactcaacggaaaacattttatatacttttctaattctacatatggtggattggtaattaaatatatcatgctcagtaatggatattctgaatataatggttctcagggaactaatccacatatgataaacggcaaaccaaaaacatttgctatcgttactagtaaaatgaaatcgtctttagaggatctattagatgtgtataattctcctgaaaacgatgatggtagtcaattgatgtttttgttttcatcaaacattatgtccgaatcctatactctgaaagaggtaaggcatatttggtttatgactatcccagatactttttctcaatacaaccaaattcttggacgatctattagaaaattctcttacgccgatatttctgaaccagttaatgtatatcttttagccgccgtatattccgatttcaatgacgaagtaacgtcattaaacgattacacacaggatgaattaattaatgttttaccatttgacatcaaaaagctgttgtatctaaaatttaagacgaaagaaacgaatagaatatactctattcttcaagagatgtctgaaacgtattctcttccaccacatccatcaattgtaaaagttttattgggagaattggtcagacaatttttttataataattctcgtattaagtataacgactccaagttacttaaaatggttacatcagttataaaaaataaagaagacgctaggaattacatagatgatattgtaaacggtcacttctttgtatcgaataaagtatttgataaatctcttttatacaaatacgaaaacgatattattacagtaccgtttagactttcctacgaaccatttgtttggggagttaactttcgtaaagaatataacgtggtatcttctccataaaactgatgagatatataaagaaataaatgtcgagctttgttaccaatggatacctttccgttacattggaacctcatgagctgacgttagacataaaaactaatattaggaatgccgtatataagacgtatctccatagagaaattagtggtaaaatggccaagaaaatagaaattcgtgaagacgtggaattacctctcggcgaaatagttaataattctgtagttataaacgttccgtgtgtaataacctacgcgtattatcacgttggggatatagtcagaggaacattaaacatcgaagatgaatcaaatgtaactattcaatgtggagatttaatctgtaaactaagtagagattcgggtactgtatcatttagcgattcaaagtactgcttttttcgaaatggtaatgcgtatgacaatggcagcgaagtcactgccgttctaatggaggctcaacaaggtatcgaatctagttttgtttttctcgcgaatatcgtcgactcataagaaagagaatagcggtaagtataaacacgaatactatggcaataattgcgaatgttttattcccttcgatatatttttgataatatgaaaaacatgtctctctcaaatcggacaaccatctcataaaatagttctcgcgcgctggagaggtagttgctgctcgtataatctccccagaataatatacttgcgtgtcgtcgttcaatttatacggatttctatagttctctgttatataatacggttttccatcatgattagacgacgacaatagtgttctaaatttagatagttgatcagaatgaatgtttattggcgttggaaaaattatccatacagcgtctgcagagtgcttgatagttgttcctagatatgtaaaataatccaacgtactaggtagcaaattgtctagataaaatactgaatcaaacggcgcagacgtattagcggatctaatggaatccaattgattgactatcttttgaaaatatacatttttatgatccgatacttgtaagaatatagaaataatgataagtccatcatcgtgtttttttgcctcttcataagaactatattttttcttattccaatgaacaagattaatctctccagagtatttgtacacatctatcaagtgattggatccataatcgtcttcctttccccaatatatatgtagtgatgataacacatattcattggggagaaaccctccacttatatatcctcctttaaaattaatccttactagttttccagtgttctggatagtggttggtttcgactcattataatgtatgtctaacggcttcaatcgcgcgttagaaattgcttttttagtttctatattaataggagatagttgttgcggcatagtaaaaatgaaatgataactgtttaaaaatagctcttagtatgggaattacaatggatgaggaagtgatatttgaaactcctagagaattaatatctattaaacgaataaaagatattccaagatcaaaagacacgcatgtgtttgctgcgtgtataacaagtgacggatatccgttaataggagctagaagaacttcattcgcgttccaggcgatattatctcaacaaaattcagattctatctttagagtatccactaaactattacggtttatgtactacaatgaactaagagaaatctttagacggttgagaaaaggttctatcaacaatatcgatcctcacttcgaagagttaatattattgggtggtaaactagataaaaaggaatctattaaagattgtttaagaagagaattaaaagaggaaagtgatgaacgtataacagtaaaagaatttggaaatgtaattctaaaacttacaacacgggataaattatttaataaagtatatataagttattgcatggcgtgttttattaatcaatcgttggaggatttatcgcatactagtatttacaatgtagaaattagaaagattaaatcattaaatgattgtattaacgacgataaatacgaatatctgtcttatatttataatatgctagttaatagtaaatgaacttttacagatctagtataattagtcagattattaagtataatagacgactagctaagtctattatttgcgaggatgactctcaaattattacactcacggcattcgttaaccaatgcctatggtgtcataaacgagtatccgtgtccgctattttattaactactgataacaaaatattagtatgtaacagacgagatagttttctctattctgaaataattagaactagaaacatgtttagaaagaaacgattatttctgaattattccaattatttgtccaaacaggaaagaagtatactatcgtcatttttttctctatatccagctactgctgataatgatagaatagatgctatttatccgggtggcatacccaaaaggggtgagaatgttccagagtgtttatccagggaaattaaagaagaagttaatatagacaattcttttgtattcatagacactcggttttttattcatggcatcatagaagataccattattaataaattttttgaggtaatcttctttgtcggaagaatatctctaacgagtgatcaaatcattgatacatttaaaagtaatcatgaaatcaaggatctaatatttttagatccgaattcaggtaatggactccaatacgaaattgcaaaatatgctctagatactgcaaaactcaaatgttatggccatagaggatgttattacgaatcattaaaaaaattaactgaggatgattgattagaaaatataaattaatttaccatcgtgtatttttataacgggattgtccggcatatcatgtagatagttaccgtctacatcgtatactcgaccatctacgcctttaaatcctctatttattgacattaatctattagaattggaataccaaatattagtaccctcaattagtttattggtaatattttttttagacgatagatcgatggctcttgaaaccaaggttttccaaccggactcattgtcgatcggtgagaagtctttttcattagcatgaatccattctaatgatgtatgtttaaacactctaaacaattggacaaattcttttgatttgctttgaatgatttcaaataggtcttcgtctacagtaggcataccattagataatctagccattataaagtgcacgtttacatatctacgttctggaggagtaagaacgtgactattgagacgaatggctcttcctactatctgacgaagagacgcctcgttccaagtcatatctagaatgaagatatcattgattgagaagaagctaataccctcgcctccactagaagagaatacgcatgttttaatgcattctccgttagtgtttgattcttggttaaactcagccaccgccttgattctagtatcttttgttctagatgagaactctatattagagataccaaagactttgaaatatagtaataagatttctattcctgactgattaacaaatggttcaaagactagacatttaccatgggatgctaatattcccaaacatacatctataaatttgacgcttttctcttttaattcagtaaatagagagatatcagccgcactagcatcccctttcaatagttctccctttttaaaggtatctaatgcggatttagaaaactctctatttcttaatgaatttttaaaatcattatatagtgttgctatctcttgcgcgtattcgcccggatcacgattttgtctttcaggaaagctatcgaacgtaaacgtagtagccatacgtctcagaattctaaatgatgatatacctgtttttatttcagcgagtttagccttttgataaatttcttcttgctttttcgacatattaacgtatcgcattaatactgttttcttagcgaatgatgcagacccttctacgtcatcaaaaatagaaaactcgttattaactatgtacgaacataggcctcctagtttggagactaattctttctcatcaactagacgtttattctcaaatagcgattggtgttgtaaggatcctggtcgtagtaagttaaccaacatggtgaattcttgcacactattgacgataggtgtagccgataaacaaatcatcttatggttttttaacgcaatggttttagataaaaaattatatactgaacgagtaggacggatcttaccatcttctttgattaatgatttagaaatgaagttatgacattcatcaataatgacgcatattctactcttggaattaatagttttgatattagtaaaaaatttatttctaaaattttgatcatcgtaattaataaaaatacaatccttcgttatctctggagcgtatctgagtatagtgttcatccaaggatcttctatcaaagcctttttcaccaataagataatagcccaattcgtataaatatccttaagatgtttgagaatatatacagtagtcattgttttaccgacacccgtttcatggaacaataaaagagaatgcatactgtctaatcctaagaaaactcttgctacaaaatgttgataatccttgaggcgtactacgtccgaccccatcatttcaacaggcatattagtagttctgcgcaatgcataatcgatataggccgcgtgtgatttactcatttatgagtgataagtaataactatgttttaaaaatcacagcagtagtttaactagtcttctctgatgtttgttttcgatacttttcgaatcagaagtcatactagaataaagcagcgagtgaacgtaatagagagcttcgtatactctattcgaaaactctaagaacttattaatgaattccgtatccactggatcgtttaaaatactaaattgaacactgttcacatccttccaagaagaagacttagtgacggacttaacatgagacataaataaatccaaattttttttacaaacatcactagccaccataatggcgctatctttcaaccagctatcgcttacgcattttagcagtctaacatttttaaagagactacaatatattctcatagtatcgattacacctctaccgaataaagttggaagtttaataatacaatatttttcgtttacaaaatcaaataatggtcgaaacacgtcgaaggttaacatcttataatcgctaatgtatagattgttttcagtgagatgattattagatttaatagcatctcgttcacgtttgaacagtttattgcgtgcgctgaggtcggcaactacggcgtccgctttagtactcctcccataatactttacgctattaatctttaaaatttcatagactttatctagatcgctttctggtaacatgatatcatgtgtaaaaagttttaacatgtcggtcggcattctatttagatcattaactctagaaatctgaagaaagtaattagctccgtattccagactaggtaatgggcttttacctagagacagattaagttctggcaatgtttcataaaatggaagaaggacatgcgttccctcccggatattttttacaatttcatccatttacaactctatagtttgttttcattattattagttattatctcccataatcttggtaatacttaccccttgatcgtaagataccttatacaggtcattacatacaactaccaattgtttttgtacataatagattggatggttgacatccatggtggaataaactactcgaacagatagtttatctttccccctagatacattggccgtaatagttgtcggcctaaagaatatctttggtgtaaagttaaaagttagggttcttgttccattattgctttttgtcagtagttcattataaattctcgagatgggtccgttctctgaatatagaacatcatttccaaatctaacttctagtctagaaataatatcggtcttattcttaaaatctattcccttgatgaagggatcgttaatgaacaaatccttggcctttgattcggctgatctattatctccgttatagacgttacgttgactagtccaaagacttacaggaatagatgtatcgatgatgttgatactatgtgatatgtgagcaaagattgttctcttagtggcatcactatatgttccagtaatggcggaaaactttttagaaatgttatatataaaagaattttttcgtgttccaaacattagcagattagtatgaagataaacactcatattatcaggaacattatcaatttttacatacacatcagcatcttgaatagaaacgataccatcttctggaacctctacgatctcggcagactccggataaccagtcggtgggccatcactaacaataactagatcatccaacaatctactcacatatgcatctatataatctttttcatcttgtgagtaccctggatacgaaataaatttattatccgtatttccataataaggtttagtataaacagagagcgatgttgccgcatgaacttcagttacagtcgccgttggttggtttatttgacctattactctcctaggtttctctataaacgatggtttaatttgtacattcttaaccatatatccaataaagctcaattcaggaacataaacaaattctttgttgaacgtttcaaagtcgaacgaagagtcacgaataacgatatcggatactggattgaaggttaccgttacggtaatttttgaatcggatagtttaagactgctgaatgtatcttccacatcaaacggagttttaatataaacgtatactgtagatggttctttaatagtgtcattaggagttaggccaatagaaatatcattaagttcactagaatatccagagtgtttcaaagcaattgtattattgatacaattattatataattcttcgccctcaatttcccaaataacaccgttacacgaagagatagatacgtgattaatacatttatatccaacatatggtacgtaaccgaatcttcccatacctttaacttctggaagttccaaactcagaaccaaatgattaagcgcagtaatatactgatccctaatttcgaagctagcgatagcctgattgtctggaccatcgtttgtcataactccggatagagaaatatattgcggcatatataaagttggaatttgactatcgactgcgaagacattagaccgtttaatagagtcatccccaccgatcaaagaattaatgatagtattattcattttctatttaaaatggaaaaagcttacaataaactccgtagagaaatatctataatttgtgagttttccttaaagtaacagcttccgtaaacgccgtctttatctcttagtaagtttattgtatttataaccttttccttatcttcatagaatactaaaggcaacaaagaaatttttggttcttctctaagagctacgtgagacttaaccatagaagccaacgaatccctacatattttagaacagaaataccctacttcaccacccttgtatgtctcaatactaataggtctaaaaaccaaatcttgattacaaaaccaacacttatcaattacactatttgtcttaatagacacatctgccatagatttataatactttggtagtatacaagcgagtgcttcttctttagcgggcttaaagactgctttaggtgctgaaataaccacatctggaaggcttactcgcttagccatttaattacggaactatttttttatacttctaatgagcaagtagaaaacctctcatctacaaaaacgtactcgtgtccataatcctctaccatagtaacacgttttttagatctcatatgtgctaaaaagttttcccatactaattggttactattatttttcgtataatttttaacagtttgaggttttagatttttagttacagaagtgatatcgaatattttatccaaaaagaatgagtaattaattgtcttagaaggagtgttttcttggcaaaagaataccaagtgcttaaatatttctactacttcattaatcttttctgtactcagattcagtttctcatcttttacttgattgattatttcaaagactaacttataatcctttttatttattctctcgttagccttaagaaaactagatacaaaatttgcatctacatcatccgtggatatttgatttttttccatgatatccaagagttccgagataatttctccagaacattgatgagacaataatctccgcaatacatttctcaaatgaataagtttattagacacgtggaagtttgactttttttgtacctttgtacatttttgaaataccgactcgcaaaaaatacaatattcatatccttgttcagatactataccgttgtgtctacaaccgctacataatcgtagattcatgttaacactctacgtatctcgtcgtccaatattttatataaaaacattttatttctagacgttgccagaaaatcctgtaatatttttagttttttgggctgtgaataaagtatcgccctaatatggttaccgtcctccgccaatatagtagttaaattatccgcacatgcagaagaacaccgcttaggcggattcagtacaatgttatatttttcgtaccaactcatttaaatatcataatctaaaatagttctgtaatatgtctagcgctaatatattgatcataatcctgtgcataaattaagatacaacaatgtctcgaaatcatcgacatggcttcttccatagttagaagatcgtcgtcaaagttagcaacgtgattcatcaacatttgctgttttgaggcagcaaatactgaaccatcgccattcaaccattcataaaaaccatcgtctgaatccattgataatttcttgtactggtttttgagagctcgcatcaatctagcatttctagctcccggattgaaaacagaaagaggatcgtacatccagggtccattttctgtaaatagaatcgtataatgtcccttcaagaagatatcagacgatccacaatcaaagaattggtctccgagtttgtaacaaactgcggactttaacctatacatgataccgtttagcataatttctggtgatacgtcaatcggagtatcatctattagagatctaaagccggtgtaacattctccaccaaacatattcttattctgacgtcgttctacataaaacatcattgctccattaacgataacaggggaatgaacagcactacccatcacattagttcccaatggatcaatgtgtgtaactccagaacatcttccatatcctatgttaggaggagcgaacaccactcttccactattgccatcgaatgccatagaataaatatccttggaattgatagaaatcggactgtcggatgttgtgatcatcttcataggattaacaacgatgtatggtgccgcctgaagtttcatatcgtaactgatgccgtttataggtctagccacagaaaccaacgtaggtctaaatccaactatagacaaaatagaagccaatatctgttcctcatctgtcataacttgagagcatccagtatgaataatcttcattagatggggatctaccgcatcatcatcgttacaataaaaaattcccattctaatgttcataattgcttttctaatcatggtatgcatgtttgctctctgaatctctgtggaaattagatctgatacacctgtaatcactatcggattatcctccgtaagacgattaaccaacaacatataattataagactttacttttctaaattcataaagttgctggattaggctataggtgtctccatgtacatacgcgttctcgagcgcaggaagtttaataccgaatagtgccatcagaataggatgaatatagtaattagtttctggttttctataaataaaagacaaatcttgtgaactagacatatcggtaaaatgcatggattggaatcgtgtagtcgacagaagaatatgatgattagatggagagtatattttatctaactctttgagttggtcaccgattctaggactagctcgagaatgaataagtactaaaggatgagtacatttcacagaaacactagcattgttcaatgtgctctttacatgggtaaggagttgaaatagctcgtttctatttgttctgacaatatttagtttattcataatgttaagcatatcctgaatagtaaagttagatgtgtcatacttgttagtagttagatatttagcaattgcattcccatcatttctcaatctcgtactccaatcatgtgtagatgctacttcatctatagaaaccatacaatcctttttgataggctgttgagattgattatttcctgcacgtttaggtttggtacgttgatttctagcccctgcggatataaagtcatcgtctacaatttgggacaatgaattgcatacactacaagacaaagatttatcagaagtgtgaatatgatcttcatctaccaaagaaagagtttgattagtataactagattttagtcctgcgttagatgttaaaaaaacatcgctattgaccacggcttccattatttatattcgtagtttttactcgaaagcgtgattttaatatccaatcttattacttttggaatcgttcaaaacctttgactagttgtagaatttgatctattgccctacgcgtatactcccttgcatcatatacgttcgtcaccagatcgtttgtttcggcctgaagttggtgcatatctttttcaacactcgacatgagatccttaagggccatatcgtctagattttgttgagatgctgctcctggatttggattttgttgtgctgttgtacatactgtaccaccagtaggtgtaggagtacatacagtggccacaataggaggttgaggaggtgtaaccgttggagtagtacaagaaatatttccatccgattgttgtgtacatgtagttgttggtaacgtctgagaaggttgggtagatggcggcgtcgtcgttttttgatctttattaaatttagagataatatcctgaacagcattgctcggcgtcaacgctggaaggagtgaactcgccggcgcatcagtatcttcagacagccaatcaaaaagattagacatatcagatgatgtattagtttgttgtcgtggttttggtgtaggagcagtactactaggtagaagaataggagccggtgtagctgttggaaccggctgtggagttatatgaatagttggttgtagcggttggataggctgtctgctggcggccatcatattatctctagctagttgttctcgcaactgtctttgataatacgactcttgagactttagtcctatttcaatcgcttcatcctttttcgtatccggatccttttcttcagaataatagattgacgactttggtgtagaggattctgccagcccctgtgagaacttgttaaagaagtccatttaaggctttaaaattgaattgcgattataagattaaatggcagacacagacgatattatcgactatgaatccgatgatctcactgaatacgaggatgatgaagaagaggaagaagatggagagtcactagaaactagtgatatagatcccaaatcttcttataagattgtagaatcagcatccactcatatagaagatgcgcattccaatcttaaacatatagggaatcatatatctgctcttaaacgacgctatactagacgtataagtctatttgaaatagcgggtataatagcagaaagctataacttgcttcaacgaggaagattacctctagtttcagaattttctgacgaaacgatgaagcaaaatatgctacatgtaattatacaagagatagaggagggttcttgtcctatagtcatcgaaaagaacggagaattgttgtcggtaaacgattttgacaaagatggtctaaaattccatctagactatattatcaaaatttggaaacttcaaaaacgatattagaatttatacgaatatcgttctctaaatgtcacaatcaagtctcgcatgttcagcaatttattgtcgtactttatatcgtgttcattaacgatatcttgcaaaatagtaatgattctatcttccttcgatagatattcttcagagattattgtcttatattctttcttgttatcagatatgaatttgataagactttgaacattattgatacccgtctgtttaattttttctacagatattttagttttggcagattctatcgtatctgtcaatagacatccaacatcgacattcgacgtcaattgtctataaatcaacgtataaattttagaaataacattagcgaattgttgtgcattgatgtcgttattctgaaacagtatgattttaggtagcattttcttaacaaagagaacgtatttattgttactcagttgaacagatgatatatccagattactaacgcatctgattccgtataccaaactttcagaagaaatggtatacaattgtttgtattcattcaatgtctctttttcagaaattagtttagagtcgaatactgcaataattttcaagagatagttttcatcagataagattttatttagtgtagatatgataaaactattgttttgttggagaacttgatacgccgcgttctctgtagtcgacgctctcaaatgggaaacaatctccattatttttttggaatcggatacaatatcttcggtatcttgacgcagtctagtatacatagagttaagagagattagagtttgtacattaagcaacatgtctctaaatgtggctacaaacttttccttttccacatcatctagtttattatataccgatttcacaacggcaccagatttaaggaaccagaatgaaaaactctgataactacaatatttcatcatagttacgattttatcatcttctatagttggtgtgatagcgcatacctttttctccaagactggaaccaacgtcataaaaatgtttaaatcaaaatccatatcaacatctgatgcgctaagaccagtctcgcgttcaagattatctttactaatggtgacgaactcatcgtataaaactctaagtttgtccattatttatttacagatttagttgtttaatttatttgtgctcttccagagttgggatagtatttttctaacgtcggtattatattattaggatctacgttcatatgtatcataatattaatcatccacgttttgataaatctatctttagcttctgaaataacgtatttaaacaaaggagaaaaatatttagctacggcatcagacgcaataacattttttgtaaatgtaacatatttagacgacagatcttcgttaaaaagttttccatctatgtagaatccatcagttgttaacaccattcccgcgtcagattgaataggagtttgaatagtttgttttggaaatagatccttcaataacttatagttgggtgggaaaaaatcgattttatcactagactctttcttttttactatcattacctcatgaactatttcttgaatgagtatatgtattttctttcctatatcggacgcgttcattggaaaatataccatgtcgttaactataagaatatttttatcctcgtttacaaactgaataatatcagatgtagttcgtaaacgaactatatcatcaccagcacaacatctaactatatgatatccactagtttcctttagtcgtttattatcttgttccatattagcagtcattccatcatttaagaaggcgtcaaagataatagggagaaatgacattttggattctgttacaactttaccaaaattaaggatatacggacttactatctttttctcaacgtcaatttgatgaacacacgatgaaaatgtacttcgatgagattgatcatgtagaaaacaacaagggatacaatatttccgcatatcatgaaatatattaagaaatcccaccttattatatttccccaaaggatccatgcacgtaaacattatgccgttatcattaataaagacttctttctcatcggatctgtaaaagttgttactgatttttttcattccaggatctagataattaataatgatgggttttctattcttattctttgtattttggcatatcctagaccagtaaacagtttccactttggtaaaatcagcagacttttgaacgctattaaacatggcattaatggcaataactaaaaatgtaaaatatttttctatgttaggaatatggtttttcactttaatagatatatggtttttggccaaaatgatagatatttttttatccgaggatagtaaaatattattagtcgccgtctctataaaaatgaagctagtctcgatatccaattttattctagaattgataggagtcgccaaatgtaccttatacgttatatctcccttgatgcgttccatttgtgtatctatatcggacacaagatctgtaaatagttttacgttattaatcatcacggtatcgccgtcgctagataatgctaatgtaccatccaagtcccaaatggagagatttaactgttcatcgtttagaataaaatgattaccggtcatattaataaagtgttcatcgtatctagataacaacgacttataattaatgtccaagtcttgaactcgctgaatgatcttttttaacccagttagttttagattggtacgaaatatattgttaaactttgattctacagtaatgtccaaatctagttgtggaaatacttccatcaacattgtttcaaacttgataatattattatctacatcttcgtacgatccaaattccggaatagatgtatcgcacgctctgaccacccagataaccaaaaagtcacacgctccaggatatacattgtataaaaagctatcgttttttagtagtgtttttttctgagtatatacgaagggattaaaaatagtattatcaacgtaactatattccaaattattcttatgagaatagataataatatcgtccttaatatctaacaaatttcctaaatatccctttaattgagtcattcgaagcgtcaatagaatatgtctcttaactatttccggctgttgtatatttaaatgacttcgtaaaaaataatatatgggcgacttctcatctatgtaatcatatggagtgagatatagggctcgttctacctcctgccccttacccacctgtaataccaattgcggacttactatatatcgcatatttatatcgtggggtaaagtgaaaatctactaccgatgatgtaagtcttacaatgttcgaaccagtaccagatcttaatttggaggcctccgtagaactaggggaggtaaatatagatcaaacaacacctatgataaaggagaatagcggttttatatcccgcagtagacgtctattcgcccatagatctaaggatgatgagagaaaactagcactacgattctttttacaaagactttattttttagatcatagagagattcattatttgttcagatgcgttgacgctgtaaaagacgtcactattaccaaaaaaaataacattatcgtggcgccttatatagcacttttaactatcgcatcaaaaggatgcaaacttacagaaacaatgattgaagcattctttccagaactatataatgaacatagtaagaaatttaaattcaactctcaagtatccatcatccaagaaaaactcggataccagtttggaaactatcacgtttatgattttgaaccgtattactctacagtagctctggctattcgagatgaacattcatctggcatttttaatatccgtcaagagagttatctggtaagttcattatctgaaataacatatagattttatctaattaatctaaaatctgatcttgttcaatggagtgctagtacgggcgctgtaattaatcaaatggtaaatactgtattgattacagtgtatgaaaagttacaactggtcatagaaaatgattcacaatttacatgttcattggctgtggaatcagaacttccaataaaattacttaaagatagaaatgaattatttacaaaattcattaacgagttaaaaaagaccagttcattcaagataagcaaacgcgataaggatacgctattaaaatattttacttaggactggagttagaatttatagacgactcatttcgtttatcattattactaccatcattattagtattcttcttgtcatcttgttcagaaatatacagcaatgctatacctaatactaaatacattatcatgctcgcaatggctctaacaacaacgaaccaaaatgaatttggtcgtagcttttgttcacaaaaatacataaagaaatgtctacataaatctatggcgccattggctacttgaaatagcgccagtcctcctacagattttaatatagctgtataacatgacatttattcatcatcaaaagagacagagtcaccatctgtcatatttagattttttttcatgtgttcaaagtatcctctactcatttcattataatagtttatcatacttagaattttaggacggatcaatgagtaagacttgactagatcgtcagtagtaatttgtgcatcgtctattctgcatccgcttcgtcgaataatgtatagcatcgctttgagattctccatagctatcaagtctttatacaatgacatggaaatatctgtgaatactttatacttctccaacatcgatgccttaacatcatcgcctactttagcattgaaaatacgttctattgtgtagatggatgtagcaagatttttaaacaacaatgccattttacacgatgattgcctcaagtctccaatcgtttgtttagaacgattagctacagagttcaacgcttggctgactagcatattattatctttagaaattgtattcttcaatgaggcgtttatcatatctgtgatttcgttagtcatattacagtctgactgggttgtaatgttatccaacatatcacctatggatacggtacacgtaccagcatttgtaataatcctatctaagatgttgtatggcattgcgcagaaaatatcttctcctgtaatatctccactctcgataaatctactcagattattcttaaatgccttattctctggagaaaagatatcagtgtccatcatttcattaatagtatacgcagaaaagataccacgagtatcaattctatccaagatacttatcggttccgagtcacagataatggtttcctctccttcgggagatcctgcatagaaatatctaggacaatagtttctatactgtctgtaactctgataatctctaaagtcactaactgataccatgaaattgagaagatcaaacgctgaagtaattaatttttctgcctcgtttttactacaactagttttcatcaatgtagtgacgatgtattgtttagttactcttggtctaatactgatgatagagatattattacttcccataatggatcttctagtagtcaccttaaagcccattgatgcaaatagcagatagataaagtcttggtatgactcctttctaatatagtacggactacctttgtcacccaactttatacccacataagccataacaacctctttaatagccgtttcatgaggtttatcagccatgagcctgagtagttggaagaatctcatgaatcccgtctcagaaagtcctatatgcatgatagatttatctttcctgggaaactctcgtatagtcatagatgaaatactcttcaaagtttctgaaataagattagtaacagtcttacctccgactactctaggtaacaaacaaactctaataggtgttttctctgcggagataatatcagaaaggatagagcaataagtagtattattgtgattataaagaccgaatacataacaggtagaatttataaacatcatgtcctgaaggtttttagacttgtattcctcgtaatccataccgtcccaaaacatggatttggtaactttgatagccgtagatctttgttccttcgccaacaggttaaagaaattaataaagaatttgttgtttctatttatgtccacaaattgcacgtttggaagcgccacggttacattcactgcagcattttgaggatcgcgagtatgaagtacgatgttattgtttactggtatatctggaaagaaatctaccagtctaggaataagagattgatatcgcatagaaatacaaaagttcataatctcatcatcgaagagcattttgttaccattgtaataaatatccactctgtcatatgtataaatgaagtactgttcaaacatgatgagatgtttatatgttggcatagtagtgagatcgacgtttggtaatggcaatgtattaagattaactccataatgtctagcagcatctgcgatgttataagtgttgtcaaagcggggtcgatcttgtgctgttatatattgtctaacacctataagattatcaaaatcttgtctgcttaatacaccgttaacaatttttgccttgaattcttttattggtgcattaataacatccttatagaggatgttaaacaaataagtattatcaaagttaagatctgggtatttcttttctgctagaacatccattgagtcggagccatctggtttaatataaccaccgataaatctagctctgtattctgtatccgtcaatctaatattaagaaggtgttgagtgaaaggtggaagatcgtaaaagctgtgagtattaatgataggattagtttccgaactaatgttaattggggtattaataatatctatatttccagcgttaagtgtaacattaaacagttttaattcacgtgacgtggtatcaattaaataattaatgcccaatttggatatagcagcctgaagctcatcttgtttagttacggatcctaatgagttattaagcaatatatcgaacggatgaacgaaggttgttttgagtttgtcgcatactttgtaatctagacatagatgcggaagaacggtagaaactatacgaaataaatattcagagtcctctaattgatcaagagtaactattgacttaataggcatcatttatttagtattaaatgacgaccgtaccagtgacggatatacaaaacgatttaattacagagttttcagaagataattatccatctaacaaaaattatgaaataactcttcgtcaaatgtctattctaactcacgttaacaacgtggtagatagagaacataatgccgccgtagtgtcatctccagaggaaatatcctcacaacttaatgaagatctatttccagatgatgattctccggccactattatcgaaagagtacaacctcatactactattattgacgatactccacctcctacgtttcgtagagagttattgatatcggaacaacgtcaacaacgagaaaaaagatttaatattacagtatcgaaaaatgctgaagcaataatggaatctagatctatgatatcttctatgccaacacaaacaccatccttgggagtagtttatgataaagataaaagaattcagatgttggaggatgaagtggttaatcttagaaatcaacgatctaatacaaaatcatctgataatttagataattttaccagaatactatttggtaagactccgtataaatcaacagaagttaataagcgtatagccatcgttaattatgcaaatttgaacgggtctcccttatcagtcgaggacttggatgtttgttcagaggatgaaatagatagaatctataaaacgattaaacaatatcacgaaagtagaaaacgaaaaattatcgtcactaacgtgattattattgtcataaacattatcgagcaagcattgctaaaactcggatttgaagaaatcaaaggactgagtaccgatatcacttcagaaattatcgatgtggagatcggagatgactgcgatgctgtagcatctaaactaggaatcggtaacagtccggttcttaatattgtattgtttatactcaagatattcgttaaacgaattaaaattatttaatttaatacattcccatatccagacaacaatcgtctggattaatctgttcctgtcgtctcataccggacgacatattaatctttttattagtaggcatctttttagatggtttctttttcccagcattaactgagtcgatacctagaagatcgtgattgatctctccgaccattccacgaacttctaattggccgtctctgacggtaccataaactattttaccagcattagtaacagcttggacaatctgaccatccatcgcattgtacgatgtagtagtaactgttgttctacgtctaggagcaccagaagtatttttggagcccttggaggttgatgtagaagaagacgaggattttgattttggtttacatgtaatacattttgaactctttgattttgtatcacatgcgccggcagtcacatctgtttgagaattaagattattgttgcctcctttgacggctgcatctccaccgatttgcgctagtagatttttaagctgtggtgtaatcttattaactgtttcgatataatcatcgtaactgcttctaacggctaaattttttttatccgccatttagaagctaaaaatatttttatttatacagaagatttaactagattatacaatgaactaatatgatccttttccagattatttacaaacttggtattttttggttctggaggaggcgaatttaaattcggacttggattcggattttgtgagttcttgatcttattatacatcgagtataggatggcgacggtaactgctacgcaaataccgatcaacaaaagaataccaatcatttattgacaataacttcactattgatcaagtatgcaatatatcatcttttcactaaataagtagtaataatgattcaacaatgtcgagatatatggacgataataatttagttcatggaaatatcgctatgattggtatgaatgactccgctaactctgtggggtgcgcagtgctttccccacatagaataaattagcattccgactgtgataataataccaagtataaacgccataatactcaatactttccatgtacgagtgggactggtagacttactaaagtcaataaaggcgaagatacacgaaagaatcaaaagaatgattccagcgattagcacgccggaaaaataatttccaatcataagcatcatgtccatttaactaataaaaattttaaatcgccgaatgaacaaagtggaatataaaccatataaaaacaatagtttgtactgcaaaaataatatctatttttgttttcgaagatatggtaaaattaaatagtagtacacagcatgttataactaacagcagcaacggctcgtaattacttatcatttactagacgaaaaggtggtgggatattttcttgctcaaataatacgaatatatcacccatccattttatgcgatgtttatatactctaatctttaatagatctatagacgacgggtttaccaacaatatagattttatcgattcatctaatttaaacccttccttaaacgtgaatgatctattatctggcataacgatgactctacctgatgaatcggacaatgtactgggccatgtagaataaattatcaacgaattatcgtctacgaacatttatatcatttgttttaattttaggacgcgaataaatagatataaaatagaaaataacagatattacaaccaatgttatggccgcgcccaaccaggtaggcagttttattttatcttttactacaggttctcctggatgatgtacgtcaccaacggcggacgtagttctagtacaattagacgtaagttctgcttgggaattttttaacgctaaagagttaacgttaatcgtgcacccaacgtatttacatctagttctttgaacatcttgattataatataaccattttctatctctagattcgtcggtgcactcatgtaaccaacataccctaggtcctaaatatttatctccggaattagattttggataattcgcgcaccaacaatttctatttcctttatgatcgttacaaaagacgtataatgccgtatccccaaaagtaaaataatcaggacgaataattctaataaactcagaacaatatctcgcatccatatgtttggagcaaatatcggaataagtagacatagccggtttccgttttgcacgtaaccattctaaacaattggggtttccaggatcgtttctacaaaatccagtcatgaaatcgtcacaatgttctgtcttgtaattattattaaatatttttggacagtgtttggtatttgtcttagaacaacattttgctacgctatcactatcgcccaggagataatccttttttataaaatgacatcgttgcccggatgctatataatcagtagcgtgttttaaatccttaatatattcaggagttacctcgttctgataatagattaatgatccaggacgaaatttgaaagaactacatggttctccatgaattaatacatattgtttagcaaattcaggaactataaaactactacaatgatctatcgacataccatctatcaaacaaaatttgggtttaatttctcccggagatgtttcataatagtacgtataactttcttctgcaaacttaacagctctattatattcaggataattaaaacctaattccatatatttgtctcgtatatctgctattcctggtgctattttgattctattaagagtaacagctgcccccattcttaataatcgtcagtatttaaactgttaaatgttggtatatcaacatctaccttatttcccgcagtataaggtttgttgcaggtatactgttcaggaatggttacatttatacttcttctatagtcctgtctttcgatgttcatcacatatgcaaagaacagaataaacaaaataatgtaagaaataatattaaatatctgtgaattcgtaaatacattgattgccataataattacagcagctacaatacacacaatagacattcccacagtgttgccattacctccacgatacatttgagttactaagcaataggtaataactaagctagtaagaggcaatagaaaagatgagataaatatcatcaatatagagattagaggagggctatatagagccaagacgaacaaaatcaaaccgagtaacgttctaacatcattatttttgaagattcccaaataatcattcattcctccataatcgttttgcatcatacctccatctttaggcataaacgattgctgctgttcctctgtaaataaatctttatcaagcactccagcacccgcagagaagtcgtcaagcatattgtaatatcttaaataactcatttatatattaaaaaatgtcactattaaagatggagtataatctttatgccgaactaaaaaaaatgacttgtggtcaacccctaagtctttttaacgaagacggggatttcgtagaagttgaaccgggatcatcctttaagtttctgatacctaagggattttacgcctctccttccgtaaagacgagtctagtattcgagacattaacaacgaccgataataaaatcactagtatcaatccaacaaatgcgccaaagttatatcctcttcaacgcaaagtcgtatctgaagtagtttctaatatgaggaaaatgatcgaatcaaaacgtcctctatacattactcttcacttggcgtgtggatttggtaagactattaccacgtgttatcttatggctacacacggtagaaaaaccgtcatttgcgtacccaataaaatgttaatacatcaatggaagacacaggtagaggcagtcggattggaacataagatatccatagatggagtaagtagtctattaaaggaactaaagactcaaagtccggatgtattaatagtagtcagtagacatctgacaaacgatgccttttgtaaatatatcaataagcattatgatttgttcatcttggatgaatcacatacgtataatctgatgaacaatacagcagttacaagatttttagcgtattatcctccgatgatgtgttattttttaactgctacacctagaccagctaaccgaatttattgtaacagtattattaatattgccaagttatccgatctaaaaaaaactatctatgcggtagatagtttttttgagccatattccacagataatattagacatatgataaaacgattagatggaccatctaataaatatcatatatatactgagaagttattatctgtagacgagcctagaaatcaacttattcttgataccctggtagaagaattcaagtcaggaactattaatcgaattttagttattactaaactacgtgaacatatggtattcttctacaaacgattattagatcttttcggaccagaggttgtatttataggagacgcccaaaatagacgtactccagatatggtcaaatcaatcaaggaactaaatagatttatattcgtatccaccttattttattccggtactggtttagatattcctagtttggattcgttgttcatttgctcggcagtaatcaacaatatgcaaatagagcaattactagggagggtatgtcgagaaacagaactattagataggacggtatatgtatttcctagcacatccatcaaagaaataaagtacatgataggaaatttcatgcaacgaattattagtctgtctgtagataaactaggatttaaacaaaaaagttatcggaaacatcaagaatccgatcccacttctgtatgtacaacatcctccagagaagaacgtgtattaaatagaatatttaactcgcaaaatcgttaagaagtttaagcgacgatccgcatgctgcgcaggccagtgtattacccctcatagtattaatataatccaatgatacttttgtgatgtcggaaatcttaaccaatttagactgacaggcagaacacgtcatgcaatcatcatcgtcatcgataactgtagtcttgggcttctttttgcggctcttcattccggaacgcacattggtgctatccatttaggtagtaaaaaataagtcagaatatgccctatagcacgatcgtgcaaaacctggtatatcgtctctatctttatcacaatatagtgtatcgacatctttattattattgacttcgtttatcttggaacatggaatgggaacatttttgttatcaacggccacctttgccttaattccagatgttgtaaaattataactaaacagtctatcatcgacacaaatgaaattcttgtttagacgtttgtagtttacgtatgcggctcgttcgcgtctcattttttcagatattgcaggtactataatattaaaaataagaatgaaataacataggattaaaaataaagttatcatgacttctagcgctgatttaactaacttaaaagaattacttagtctgtacaaaagtttgagattttcagattctgcggctatagaaaagtataattctttggtagaatggggaacatctacttactggaaaataggcgtgcaaaaggtagctaatgtcgagacgtcaatatctgattattatgatgaggtaaaaaataaaccgtttaatattgatccgggctattacattttcttaccggtatattttgggagcgtctttatttattcgaagggtaaaaatatggtagaacttggatctggaaactcttttcaaataccagatgatatgcgaagtgcgtgtaacaaagtattagacagcgataacggaatagactttctgagatttgttttgttaaacaatagatggataatggaagatgctatatcaaaatatcagtctccagttaatatatttaaactagctagtgagtacggattaaacatacccaaatatttagaaattgaaatagaggaagacacattatttgacgacgagttatactctattatagaacgctcttttgatgataaatttccaaaaatatccatatcgtatattaagttgggagaacttagacggcaagttgtagactttttcaaattctcgttcatgtatattgagtccatcaaggtagatcgtataggagataatatttttattcctagcgttataacaaaatcaggaaaaaagatattagtaaaagatgtagaccatttaatacgatccaaggttagagaacatacatttgtaaaagtaaaaaagaaaaacacattttccattttatacgactatgatggaaacggaacagaaactagaggagaagtaataaaacgaattatagacactataggacgagactattatgttaacggaaagtatttctctaaggttggtagtgcaggcttaaagcaattgactaataaattagatattaatgagtgcgcaactgtcgatgagttagttgatgagattaataaatccggaactgtaaaacgaaaaataaaaaaccaatcagcatttgatttaagcagagaatgtttgggatatccagaagcggattttataacgttagttaataacatgcggttcaaaatagaaaattgtaaggttgtaaatttcaatattgaaaatactaattgtttaaataacccgagtattgaaactatatatagaaactttaaccagttcgtctcaatctttaatgtcgtcaccgatgtcaaaaaaagattattcgagtgaaataatatgcgcctttgatataggtgcaaaaaatcctgccagaactgttttagaagtcaaggataactccgttagggtattggatatatcaaaattagactggagttctgattgggaaaggcgcatagctaaagatttgtcacaatatgaatacactacagttcttctagaacgtcagcctagaaggtcgccgtatgttaaatttatctattttattaaaggctttttatatcatacatcggctgccaaagttatttgcgtctcgcctgtcatgtctggtaattcatatagagatcgaaaaaagagatcggtcgaagcatttcttgattggatggacacattcggattgcgagactccgttccggatagacgcaaattagacgatgtagcggatagtttcaatttggctatgagatacgtattagataaatggaatactaattatacaccttataataggtgtaaatctaggaattacataaaaaaaatgtaataacgttagtaacgccattatggataatctatttacctttctacatgaaatagaagatagatatgccagaactatttttaactttcatctaataagttgcgatgaaataggagatatatatggtcttatgaaagaacgaatttcctcagaggatatgtttgataatatagtgtataataaagatatacatcatgccattaagaaactagtgtattgcgacatccaacttactaaacacattattaatcagaatacgtatccggtatttaacgattcttcacaagtgaaatgttgtcattatttcgatataaactcagataatagcaatattagctctcgtacagtagagatatttgagagggaaaagtcatctcttgtatcatatattaaaactaccaataagaagagaaaggtcaattacggcgaaataaagaaaactgttcatggaggcactaatgcaaattacttttccggtaaaaagtctgatgagtatctgagtactacagttagatccaacattaatcaaccttggatcaaaaccatttctaagagaatgagagtagatatcattaatcactctatagtaacgcgtggaaaaagctctatattacaaactatagaaattatttttactaatagaacatgtgtgaaaatattcaaggattctactatgcacattattctatccaaggacaaggatgaaaaggggtgtatacacatgattgacaaattattctatgtctattataatttatttctgttgttcgaagatatcatccaaaacgagtactttaaagaagtagctaatgttgtaaaccacgtacttacggctacggcattagatgagaaattattcctaattaagaaaatggctgaacacgatgtttatggagttagcaatttcaaaatagggatgtttaacctgacatttattaagtcgttggatcataccgttttcccctctctgttagatgaggatagcaaaataaagttttttaaggggaaaaagctcaatattgtagcattacgatctctggaggattgtataaattacgtgactaaatccgagaatatgatagaaatgatgaaggaaagatcgactattttaaatagcatagatatagaaacggaatcggtagatcgtctaaaagaattgcttctaaaatgaaaaaaaacactgattcagaaatggatcaacgactcggatataagtttttggtgcctgatcctaaagccggagttttttatagaccgttacatttccaatatgtatcgtattctaattttatattgcatcgattgcatgaaatcttgaccgtcaagcggccactcttatcgtttaagaataatacagaacgaattatgatagaaattagcaatgttaaagtgactcctccagattactcacctataatcgcgagtattaaaggtaagagttatgacgcattagccacgttcactgtaaatatctttaaagaggtaatgaccaaagagggtatatccatcactaaaataagtagttatgagggaaaagattctcatttgataaaaattccgctactaataggatacgggaataaaaatccacttgatacagccaagtatcttgttcctaatgtcataggtggagtctttatcaataaacaatctgtcgaaaaagtaggaattaatctagtagaaaagattacaacatggccaaaatttagggttgttaagccaaactcattcactttctcgttttcctccgtatcccctcctaatgtattaccgacaagatatcgccattacaagatatctctggatatatcacaattggaagcgttgaatatatcatcgacaaagacatttataacggtcaatattgttttgctgtctcaatatttatctagagtgagtctagaattcattagacgtagcttatcatacgatatgcctccagaagttgtctatctagtaaacgcgataatagatagtgctaaacgaattactgaatctattactgactttaatattgatacatacattaatgacctggtggaagctgaacacattaaacaaaaatctcagttaacgatcaacgagttcaaatatgaaatgctgcataactttttacctcatatgaactatacacccgatcaactaaagggattttatatgatatctttactaagaaagtttctctactgtatctaccacacttctagatatccagatagagattcgatggtttgtcatcgtatactaacatacggcaaatattttgagacgttggcacatgatgaattagagaattacataggcaacatccgaaacgatatcatgaacaatcacaagaacagaggcacttacgcggtaaacattcatgtactaacaactcctggacttaatcatgcattttctagcttattgagtggaaagttcaaaaagtcagacggtagttatcgaacacatcctcactattcatggatgcagaatatttctattcctaggagtgttggattttatccggatcaagtaaagatttcaaagatgttttctgtcagaaaataccatccaagtcaatatctttacttttgttcatcagacgttccggaaagaggtcctcaggtaggtttagtatctcaattgtctgtcttgagttccattacaaatatactaacgtctgagtatttggatttggaaaagaaaatttgtgagtatatcagatcatattataaagatgatataagttactttgaaacaggatttccaatcactatagaaaatgctctagtcgcatctcttaatccaaatatgatatgtgattttgtaactgactttagacgtagaaaacggatgggattcttcggtaacttggaggtaggtattactttagttagggatcacatgaatgaaattcgcattaatattggagcgggaagattagtcagaccattcttggttgtggataacggagagctcatgatggatgtgtgtccggagttagaaagcagattagacgatatgacattctctgacattcagaaagagtttccacatgtcatcgaaatggtagatatagaacaatttacttttagtaacgtatgtgaatcggttcaaaaatttagaatgatgtcaaaggatgaaagaaagcaatacgatttatgtgactttcctgccgaatttagagatggatatgtggcatcttcattagtgggaatcaatcacaattctggacccagagctattcttggatgtgctcaagctaaacaagctatctcttgtctgagttcggatatacgaaataaaatagacaatggaattcatttgatgtatccagagaggccaatcgtgattagtaaggctttagaaacttcaaagattgcggctaattgcttcggccaacatgttactatagcattaatgtcgtacaaaggtatcaatcaagaggatggaattatcatcaaaaaacaatttattcagagaggcggtctcgatatagttaccgcaaagaaacatcaagtagaaattccgttggaaaactttaataacaaagaaagagataggtctaatgcatattcgaaattagaaagtaatggattagttagactgaatgctttcttggaatccggagacgctatggcacgaaatatctcatcaagaactcttgaagatgattttgctagagataatcagattagcttcgatgtttccgagaaatataccgatatgtacaaatctcgcgttgaacgagtacaagtagaacttactgacaaagttaaggtacgagtattaaccatgaaagaaagaagacccattctaggagacaaatttaccactagaacgagtcaaaagggaacagtcgcgtatgtcgcggatgaaacggaacttccatacgatgaaaatggtatcacaccagatgtcattattaattctacatccatcttctctagaaaaactatatctatgttgatagaggttattttaacagccgcatattctgctaagccgtacaacaataagggagaaaaccgacctgtctgttttcctagtagtaacgaaacatccatcgatacatatatgcaattcgctaaacaatgttatgagcattcaaatccgaaattgtctgatgaagaattatcggataaaatcttttgtgaaaagattctctatgatcctgaaacggataagccttatgcatccaaagtattttttggaccaatttattacttgcgtctgaggcatttaactcaggacaaggcaaccgttagatgtagaggtaaaaagacgaagctcattagacaagcgaatgagggacgaaaacgtggaggaggtattaagtttggagaaatggagagagactgtttaatagcgcatggcgcagccaatactattacagaagttttgaaagattcggaagaagattatcaagatgtgtatgtttgtgaaaattgtggagacatagcagcacaaatcaagggtattaatacatgtcttagatgttcaaaacttaatctctctcctctcttaacaaaaattgataccacgcacgtatctaaagtatttcttactcaaatgaacgccagaggcgtaaaagtcaaattagatttcgaacgaaggcctccttcgttttataaaccattagataaagttgatctcaagccgtcttttctggtgtaatattctagtttggtagtagatacatatcaatatcatcaaattcgagatccgaattataaaatgggcgtggattgttaactatagaatcggacgtctgatattcgaaaatctgtggagtttcaggttttggtggaggtgtaactgctacttgggatactgaagtctgatattcagaaagctgggggatgttctggttcgacatccaccgatggtgtcacatcactaatcggttcggtaacgtctgtggatggaggtgctacttctacagaacctgtagcctcagttgtcaacggagatacatttttaatgcgaggaaatgtataatttggtaatggtttctcatgtggatctgaagaagaggtaagatatctactagaaagataccgatcacgttctagttctcttttgtagaacttaactttttctttctcagcatctagttgatattccaacctcttcacgttactacgttcagatttcaattcacgttcgcatgggttacctccgcagtttttacgagcgatttcacgttcagccttcatgcgtctctgtgatccgtttacgttaaaccataaatacatgggtgatcctataaacatgaatttatttctaattctcagagctatagttaattgaccgtgtaatatttgcttacatgcatacttgatacgctcattaataagatttttatcattgctcgttatctcagaatcgtatatataaggagtaccatcgtgattcttaccagatattatacaaaatactatatataaaatatattgaccaacgttagtaatcatataaatgtttaacgttttaaattttgtattcaatgatccattatcatacgctagcatggtcttatgatattcattctttaaaatataatattgtgttagccattgcattggagctcctaatggagattttctattctcgtccattttaggatatgctttcataaagtccctaataacttcgtgaataatgtttctatgttttctactgatgcatgtatttgcttcgatttttttatcccatgtttcatctatcatagatttaaacgcagtaatgctcgcaacattaacatcttgaaccgttggtacaattccgttccataaatttataatgttcgccatttatataactcattttttgaatatacttttaattaacaaaagagttaagttactcatatggacgccgtccagtctgaacatcaatctttttagccagagatatcatagccgctcttagagtttcagcgtgattttccaacctaaatagaacttcatcgttgcgtttacaacacttttctatttgttcaaactttgttgttacattagtaatctttttttccaaattagttagccgttgtttgagagtttcctcattgtcgtcttcatcggctttaacaattgcttcgcgtttagcctctggctttttatcagcctttgtagaaaaaaattcagttgctggaattgcaagatcgtcatctccggggaaaagagttccgtccatttaaagtacagattttagaaactgacactctgcgttatttatatttggtacaacacatggattataaatattgatgttaataacatcagaaaatgtaaagtctatacattgttgcatcgtgttaaattttctaatggatctagtattattgggtccaacttctgcctgaaatccaaatatggaagcggatacaaaaccgtttcctggataaaccacacatctccacttttgctttacatcagaaattgtgtcgttgacatcttgaactctcctatctaatgccggtgttccacctatagattttgaatattcgaatgctgcatgagtagcattaaattccttaatattgccataattttcatatattgagtaaccctggataaaaagtaaacacaccgcagccgtcgctaccacaataaaaaaaattgatagagagttcatttataatctattagaagctgacaaaatttttttacacgcatcagacaatgctttaataaatagttcaacatctacttttgtcatatcgaaccgatggtatgattctaacctagaattacatccgaaaaagttgactatgttcatagtcattaagtcattaacaaacaacattccagactctggattataagacgatactgtttcgtcacaatcacctaccttaatcatgtgattatgaatattggctattagagcaccttctaagaaatctataatatctttgaaacacgatttaaaatcaaaccacgaatatacttctacgaagaaagttagtttacccataggagagataactataaatggagatctaaatacaaaatccggatctatgatagttttaacattattatattctctattaaatacctccacatctaaaaatgttaattttgaaactatgtcttcgtttattaccgtacctgaactaaacgctataagctctattgtttgagaactctttaaacgatattcttgaaatacatgtaacaaagtttcctttaactcggtcggtttatctaccatagttacagaatttgtatccttatctataatataataatcaaaatcgtataaagttatataattatcgcgttcagattgggatcttttcaaatagactaaaaaccccatttctctagtaagtatcttatgtatatgtttgtaaaatatcttcatggtgggaatatgctctaccgcagttagccattcctcattgacagcggtagatgtattagacaaaactattccaatgtttaacaagggccattttacgagattattaaatccttgtttgataaatgtagccaatgagggttcgagttcaacgacgattgaattctcttcccgcggatgctgcatgatgaacgacgggatgttgttcgattgatttggaattctttttcgactttttgtttatattaaatattttaaaatttatagctgatagcaattcatgtaccacggataatgtagacgcgtattgcgcatcgatatctttattattagataaatttatcaataaatgtgagaagtttgcctcgttaaggtcttccatttaaatattatataaacatttgtgtttgtatcttattcgtcttttatggaatagttttttactagtaaagctgcaattacacactttgtccgtaaaacataaatataaacaccagcttttatcaatcgttccaaaaagtcgacggcggacatttttaacatggcatctattttaaatacacttaggtttttggaaaaaacatcattttataattgtaacgattcaataactaaagaaaagattaagattaaacataagggaatgtcatttgtattttataagccaaagcattctaccgttgttaaatacttgtctggaggaggtatatatcatgatgatttggttgtattggggaaggtaacaattaatgatctaaagatgatgctattttacatggatttatcatatcatggagtgacaagtagtggagtaatttacaaattgggatcgtctatcgatagactttctctaaataggactattgttacaaaagttaataattatgatgatacattttttgacgacgatgattgatcgctattgcacaattttgtttttttactttctaatatagcgtttagattctttttcatgtgcgaatattgatttactaaaatatcgatgtttaacttttgttctatgacgtccttatcggcggtatcggtacatatacgtaattcaccttcacaaaatacggagtcttcgataataatagccaatcgattattggatctagctgtctgtatcatattcaacatgtttaatatatcctttcgtttcccctttacaggcatcgatcgtagcatattttccgcgtctgagatggaaatgttaaaactacaaaaatgcgtaatgttagcccgtcctaatattggtacgtgtctataagtttggcatagtagaataatagacgtgtttaaatgccttccaaagtttaagaattctattagagtattgcattttgatagtttatcgcctacatcatcaaaaataagtaaaaagtgtgctgattttttatgattttgtgcgacagcaatacatttttctatgttacttttagttcgtatcagattatattctagagattcctgactactaacgaaattaatatgatttggccaaatgtatccatcataatctgggttataaacgggtgtaaacaagaatatatgtttatattttttaactagtgtagaaaacagagatagtaaatagatagtttttccagatccagatcctcccgttaaaaccattctaaacggcatttttaataaattttctcttgaaaattgtttttcttggaaacaattcataattatatttacagttactaaattaatttgataataaatcaaaatatggaaaactaaggtcgttagtagggaggagaacaaagaaggcatatcgtgatataaataacatttattatcatgatgacaccagaaaacgacgaagagcagacatctgtgttctccgctactgtttacggagacaaaattcaaggaaagaataaacgcaaacgcgtgattggtctatgtattagaatatctatggttatttcactactatctatgattaccatgtccgcgtttctcatagtgcgcctaaatcaatgcatgtctgctaacgaggctgctattactgacgccgctgttgccgttgctgctgcatcatctactcatagaaaggttgcgtctagcactacgcaatatgatcacaaagaaagctgtaatggtttatattaccagggttcttgttatatattacattcagactaccagttattctcggatgctaaagcaaattgcactgcggaatcatcaacactacccaataaatccgatgtcttgattacctggctcattgattatgttgaggatacatggggatctgatggtaatccaattacaaaaactacatccgattatcaagattctgatgtatcacaagaagttagaaagtatttttgtgttaaaacaatgaactaatatttatttttgtacattaataaatgaaatcgcttaatagacaaactgtaagtatgtttaagaagttgtcggtgccggccgctataatgatgatactctcaaccattattagtggcataggaacatttctgcattacaaagaagaactgatgcctagtgcttgcgccaatggatggatacaatacgataaacattgttatctagataccaacattaaaatgtccacagataatgcggtttatcagtgtcgtaaattacgagctagattgcctagacctgatactagacatctgagagtattgtttagtattttttataaagattattgggtaagtttaaaaaagaccaataataaatggttagatattaataatgataaagatatagatattagtaaattaacaaattttaaacaactaaacagtacgacggatgctgaagcgtgttatatatacaagtctggaaaactggttaaaacagtatgtaaaagtactcaatctgtactatgtgttaaaaaattctacaagtgacaacaaaaaatgaattaataataagtcgttaacgtacgccgccatggacgccgcgtttgttattactccaatgggtgtgttgactataacagatacattgtatgatgatctcgatatttcaatcatggactttataggaccatacattataggtaacataaaaactgtccaaatagatgtacgggatataaaatattccgacatgcaaaaatgctactttagctataagggtaaaatagttcctcaggattctaatgatttggctagattcaacatttatagcatttgtgccgcatacagatcaaaaaataccatcatcatagcatgcgactatgatatcatgttagatatagaagataaacatcagccattttatctattcccatctattgatgtttttaacgctacaatcatagaagcgtataacctgtatacagctggagattatcatctaatcatcaatccttcagataatctgaaaatgaaattgtcgtttaattcttcattctgcatatcagacggcaatggatggattataattgatgggaaatgcaatagtaattttttatcataaaagttgtaaagtaaataataaaacaataaatattgaactagtagtacgtatattgagcaatcagaaatgatgctggtacctcttatcacggtgacagtagttgcgggaacaatattagtatgttatatattatatatttgtaggaaaaagatacgtactgtctataatgacaataaaattatcatgacaaaattaaaaaagataaagagttctaattccagcaaatctagtaaatcaactgatagcgaatcagactgggaggatcactgtagtgctatggaacaaaacaatgacgtagataatatttctaggaatgagatattggacgatgatagcttcgctggtagtttaatatgggataacgaatccaatgttatggcgcctagcacagaacacatttacgatagtgttgctggaagcacgctgctaataaataatgatcgtaatgaacagactatttatcagaacactacagtagtaattaatgaaacggagactgttgaagtacttaatgaagataccaaacagaatcctaactattcatccaatcctttcgtaaattataataaaaccagtatttgtagcaagtcaaatccgtttattacagaacttaacaataaatttagtgagaataatccgtttagacgagcacatagcgatgattatcttaataagcaagaacaagatcatgaacacgatgatatagaatcatcggtcgtatcattggtgtgattagtttcctttttataaaattgaagtaatatttagtattattgctgccgtcacgttgtacaaatggagatattccctgtattcggcatttctaaaattagcaattttattgctaataatgactgtagatattatatagatacagaacatcaaaaaattatatctgatgagatcaatagacagatggatgaaacggtacttcttaccaacatcttaagcgtagaagttgtaaatgacaatgagatgtaccatcttattccccatagactatcgactattatactctgtattagttctgtcggaggatgtgttatctctatagataatgacgtcaatggcaaaaatattctaacctttcccattgatcatgctgtaatcatatccccactgagtaaatgtgtcgtagttagcaagggtcctacaaccatattggttgttaaagcggatatacctagcaaacgattggtaacatcgtttacaaacgacatactgtatgtaaacaatctatcactgattaattatttgccgttgtctgtattcattattagacgagttaccgactatttggatagacacatatgcgatcagatatttgcgaataataagtggtattccattataaccatcgacaataagcagtttcctattccatcaaactgtataggtatgtcctctgccaagtacataaattctagcatcgagcaagatactttaatacatgtttgtaacctcgagcatccattcgacttagtatacaaaaaaatgcagtcgtacaattctgtacctatcaaggaacaaatattgtacggtagaattgataatataaatatgagcattagtatttctgtgtattaatagatttctagtatggggatcattaatcatctctaatctctaaatacctcataaaacgaaaaaaaagctattatcaaatactgtacggaatggattcattctcttctctttttatgaaactctgttgtatatctactgataaaactggaagcaaaaaatctgatagaaagaataagaataagatcaagatcaaggattatatggaacacgattattataaaataacaatagttcctggttcctcttccacgtctactagctcgtggtattatacacatgcctagtaatagtctctttgcgttgacggaaagcagactagaaataacaggctaaaatgttcagacaccataatagttcccaacccagataataacagagtaccatcaacacattcctttaaactcaatcccaaacccaaaaccgttaaaatgtatccggccaattgatagtagataatgaggtgtacagcgcatgataatttacacagtaaccaaaatgaaaatactttagtaattataagaaatatagatggtaacgtcatcatcaacaatccaataatatgccggagagtaaacattgacggataaaacaaaaatgctccgcataactctatcatggcaataacacaaccaaatacttgtaagattcctaaattagtagaaaatacaacggatatcgatgtataagtgatctcgagaaataataagaataaagtaatgcccgtaaagataaacatcaacattgtttggtaatcattaaaccaattagtatgaagttgaactaatttcacagtagattttattccagtgttatcctcgcatgtataagtacctggtaagatatctttatattctataatcaatgagacatcactatccgataacgaatgaagtctagcactagtatgccatttacttaatattgtcgtcttggaagttttattataagttaaaatatcatggttatccaatttccatctaatatactttgtcggattatctatagtacacggaataatgatggtatcattacatgctgtatactctatggtctttgtagttgttataacaaccaacgtatagaggtatatcaacgatattctaactcttgacattttttatttatttaaaatgatacctttgttatttattttattctattttgctaacggtattgaatggcataagtttgaaacgagtgaagaaataatttctacttacttattagacgacgtattatacacgggtgttaatggggcggtatacacattttcaaataataaactaaacaaaactggtttaactaataataattatatcacaacatctataaaagtagaggatgcggataaggatacattagtatgcggaaccaataacggaaatcccaaatgttggaaaatagacggttcagacgacccaaaacatagaggtagaggatacgctccttatcaaaatagcaaagtaacgataatcagttacaacgaatgtgtactatctgacataaacatatcaaaagaaggaattaaacgatggagaagatttgacggaccatgtggttatgatttatacacggcggataacgtaattccaaaagatggtttacgaggagcattcgtcgataaagatggtacttatgacaaagtttacattcttttcactgatactatcggctcaaagagaattgtcaaaattccgtatatagcacaaatgtgcctaaacgacgaaggtggtccatcatcattgtctagtcatagatggtcgacgtttctcaaagtcgaattagaatgtgatatcgacggaagaagttatagacaaattattcattctagaactataaaaacagataatgatacgatactatatgtattcttcgatagtccttattccaagtccgcattatgtacctattctatgaataccattaaacaatctttttctacgtcaaaattggaaggatatacaaagcaattgccgtctccagctcctggtatatgtttaccagctggaaaagttgtttcacataccacgtttgaagtcatagaaaaatataatgtactagatgatattataaagcctttatctaaccaacctatcttcgaaggaccgtctggtgttaaatggttcgatataaaggagaaggaaaatgaacatcgggaatatagaatatacttcataaaagaaaattctatatattcgttcgatacaaaatctaaacaaactcgtagctcgcaagtcgatgcgcgactattttcagtaatggtaacttcgaaaccgttatttatagcagatatagggataggagtaggaatgccacaaatgaaaaaaatacttaaaatgtaatcttaatcgagtacaccacacgacaatgaacaaacctaagacagattatgctggttatgcttgctgcgtaatatgcggtctaattgtcggaattatttttacagcgacactattaaaagttgtagaacgtaaattagttcatacaccatcaatagataaaacgataaaagatgcatatattagagaagattgtcctactgactggataagctataataataaatgtatccatttatctactgatcgaaaaacctgggaggaaggacgtaatacatgcaaagctctaaatccaaattcggatctaattaagatagagactccaaacgagttaagttttttaagaagccttagacgaggctattgggtaggagaatccgaaatattaaaccagacaaccccatataattttatagctaaaaatgccacgaagaatggaaatatatttgtagcacaacgaatactcccaaactgcattcgtgttacactatataacaattacactacatttttatcataccactacttcggttagatgttttagaaaaaaataaatatcgccgtaccgttcttgtttttataaaaataacaattaacaattatcaaattttttctttaatattttacgtggttgaccattcttggtggtaaaataatctcttagtgttggaatggaatgctgtttaatgtttccgcactcatcgtatattttgacgtatgcagtcacatcgtttacgcaatagtcagactgtagttctatcatgcttcctacatcagaaggaggaacagttttaaagtctcttggttttaatctattgccattagttttcatgaaatcctttgttttatccacttcacattttaaataaatgtccactatacattcttctgttaattttactagatcgtcatgggtcatagaatttataggttccgtagtccatggatccaaactagcaaacttcgcgtatacggtatcgcgattagtgtatacaccaactgtatgaaaattaagaaaacagtttaatagatcaacagaaatatttaatcctccgtttgatacagatgcgccatatttatggatttcggattcacacgttgtttgtctgaggggttcgtctagcgttgcttctacgtaaacttcgattcccatatattctttattgtcagaatcgcataccgatttatcatcatacactgtttgaaaactaaatggtatacacatcaaaataataaataataacgagtacattctgcaatattgttatcgtaattggaaaaatagtgttcgagtgagttggattatgtgagtattggattgtatattttattttatattttatattttatattttgtaataagaataaaatgctaatgtcaagtttattccaatagatgtcttattaaaaaacatatataataaataacaatggctgaatggcataaaattatcgaggatatctcaaaaaataataagttcgaggatgccgccatcgttgattacaagactacaaagaatgttctagctgctattcctaacagaacatttgccaagattaatccgggtgaaattattcctctcatcactaatcgtaatattctaaaacctcttattggtcagaaatattgtattgtatatactaactctctaatggatgagaacacgtatgctatggagttgcttactgggtacgcccctgtatctccgatcgttatagcgagaactcataccgcacttatatttttgatgggtaagccaacaacatccagacgtgacgtgtatagaacgtgtagagatcacgctacccgtgtacgtgcaactggtaattaaaataaaaagtaatattcatatgtagtgtcaattttaaatgatgatgatgaaatggataatatccatattgacgatgtcaataatgccggtattggcatacagctcatcgatttttagatttcattcagaggatgtggaattatgttatgggcatttgtattttgataggatctataatgtagtaaatataaaatataatccgcatattccatatagatataattttattaatcgcacgttaaccgtagatgaactagacgataatgtcttttttacacatggttattttttaaaacacaaatatggttcacttaatcctagtttgattgtctcattatcaggaaacttaaaatataatgatatacaatgctcagtaaatgtatcgtgtctcattaaaaatttggcaacgagtacatctactatattaacatctaaacataagacttattctctacatcggtccacgtgtattactataataggatacgattctattatatggtataaagatataaatgacaagtataatgacatctatgattttactgcaatatgtatgctaatagcgtctacattgatagtgaccatatacgtgtttaaaaaaataaaaatgaactcttaattatgctatgctattagaaatggataaaatcaaaattacggttgattcaaaaattggtaatgttgttaccatatcgtataacttggaaaagataactattgatgttacaccaaaaaagaaaaggatgtattattagcgcaatcagttgctgtcgaagaggcaaaagatgtcaaggtagaagaaaaaaatattatcgatattgaagatgacgatgatatggatgtagaaagcgcgtaatactatctataaacataagtatataataaatactttttatttacggtactcttgtagtggtgataccctactcgattatttttttaaaaaaaaaatacttattctgattcttctaaccatttccgtgttcgtttgaatgccacatcgacgtcaaagataggggagtagttgaaatctagttctgcattgttggtacgcacctcaaatgtagtgttggatatcttcaacgtatagttgttgagtagtgatggttttctaaatagaattctcttcatatcattcttgcacgcgtacatttttagcatccatcttggaatcctagatccttgttctattcccaatggtttcatcaatagaagattaaacatatcgtacgaacacgatggagagtaatcgtagcaaaagtaagcatttcctttaatcttagatcccggatactggatatattttgcagccaacacgtgcatccatgcagcatttcctacatatacccggctatgtaccgcgttatcatcgactgtacgatacataatgttaccgtgttgcttacattgctcgtaaaagactttcgtcaatttgtctccttctccgtaaattccagtgggtcttaggcaacaagtatacaattttgctccattcatgattacggaattattggctttcataaccagttgctcggccatacgtttactttttgcgtatacatgtcctggtgatatatcataaagggtatgctcatggccgatgaatggatcaccgtgtttattgggtcctattgcttccatgctactagtatagatcaaatacttgattcctaggtccacacaagctgccaatatagtctgtgttccataatagtttactttcatgatttcattatcggtgtattttccaaatacatccactagagcagccgtatgaataatcagatttaccccatctagcgcttctctcaccttatcaaagtcgtttatatcacattgtatatagtttataaccttaactttcgaggttattggttgtggatcttctacaatatctatgactctgatttcttgaacatcatctgcactaattaacagttttactatatacctgcctagaaatccggcaccaccagtaaccgcgtacacggccattgctgccactcataatatcagactacttattctattttactaaataatggctgtttgtataatagaccacgataatatcagaggagttatttactttgaaccagtccatggaaaagataaagttttaggatcagttattggattaaaatccggaacgtatagtttgataattcatcgttacggagatattagtcaaggatgtgattccataggcagtccagaaatatttatcggtaacatctttgtaaacagatatggtgtagcatatgtttatttagatacagatgtaaatatatttacaattattggaaaggcgttatctatttcaaaaaatgatcagagattagcgtgtgaagttattggtatttcttacataaatgaaaagataatacattttcttacaattaacgagaatggcgtttgatatatcagttaatgcgtctaaaacaataaatgcattagtttacttttctactcagcaaaataaattagtcatacgtaatgaagttaatgatacacactacactgtcgaatttgatagggacaaagtagttgacacgtttatttcatataatagacataatgacaccatagagataagaggggtgcttccagaggaaactaatattggttgcgcggttaatacgccggttagtatgacttacttgtataataagtatagttttaaactgattttagcagaatatataagacacagaaatactatatccggcaatatttattcggcattgatgacactagatgatttggctattaaacagtatggagacattgatctattatttaatgagaaacttaaagtagactccgattcgggactatttgactttgtcaactttgtaaaggatatgatatgttgtgattctagaatagtagtagctctatctagtctagtatctaaacattgggaattgacaaataaaaagtataggtgtatggcattagccgaacatatatctgatagtattccaatatctgagctatctagactacgatacaatctatgtaagtatctacgcgggcacactgagagcatagaggatgaatttgattattttgaagacgatgattcgtctacatgttctgccgtaaccgacagggaaacggatgtataattttttttatagcgtgaaggatatgataaaaaatataattgttgtatttatcccattccaatcaccttatatgattctgtaaaaaaattatactgtaacacaataaaggagtcttatagatgtatagaggtcagatactggtttgataaactgtttattccacataagtatgtttgactttatggttagacccgcatactttaacaaatcactgaaaattggagttaggtattgacctctcagaatcagttgccgttctggaacattaaatgtattttttatgatatactccaacgcatttatgtgggcatacaacaagtcattactaatggagtattccaagagttttagttgtctagtatttaacaagagaagagatttcaacagactgtttatgaactcgaatgccgcctcattgtcgcttatattgatgatgtcgaattctcccaatatcatcaccgatgagtagctcatcttgttatcgggatccaagttttctaaagatgtcattaaaccctcgatcatgaatggatttatcatcatcgtttttatgttggacatgagcttagtccgtttgtccacatctatagacgacgatttctgaattatttcatatatccctctctttaactccaggaacttgtcaggatggtctactttaatatgttctcgtctaagagatgaaaatctttggatggttgcacgcgacttttctctaaaggatgacgttgcccaagatcctctcttaaatgaatccatcttatccttggacaagatggacagtctattttccttagatggtttaatatttttgttacccatgatctataaaggtagacctaatcgtctcggatgaccatatatttattttcagttttattatacgcataaattgtaaaaaatatgttaggtttacgaaaatgtctcgtggggcattaatcgtttttgaaggattggacaaatctggaaaaacaacacaatgtatgaacatcatggaatctataccggcaaacacgataaaatatcttaactttcctcagagatccactgtcactggaaagatgatagatgactatctaactcgtaaaaaaacctataatgatcatatagttaatctattattttgtgcaaatagatgggagtttgcatcttttatacaagaacaactagaacagggaattactttaatagttgatagatacgcattttctggagtagcgtatgccgccgctaaaggcgcgtcaatgactctcagtaagagttatgaatctggattgcctaaacccgacttagttatattcttggaatctggtagcaaagaaattaatagaaacgtcggcgaggaaatttatgaagatgttacattccaacaaaaggtattacaagaatataaaaaaatgattgaagaaggagatattcattggcaaattatttcttctgaattcgaggaagatgtaaagaaggagttgattaagaatatagttatagaggctatacacacggttactggaccagtggggcaactgtggatgtaatagtgaaattacattttttataaatagatgttagtacagtgttataaatggatgaagcatattactctggcaacttggaatcagtactcggatacgtgtccgatatgcataccgaactcgcatcaatatctcaattagttattgccaagatagaaactatagataatgatatattaaacaaggacattgtaaattttatcatgtgtagatcaaacttggataatccatttatctctttcctagatactgtatatactattatagatcaagagaactatcagactgagttgattaattcattagacgacaatgaaattatcgattgtatagttaataagtttatgagcttttataaggataacctagaaaatatagtagatgctatcatcactctaaaatatataatgaataatccagattttaaaactacgtatgccgaagtactcggttccagaatagccgatatagatattaaacaagtgatacgtaagaatatactacaattgtctaatgatatccgcgaacgatatttgtgaaaaatattaaaaaaaaatactttttttattaaatgacgtcgcttcgcgaatttagaaaattatgctgtgatatatatcacgcatcaggatataaagaaaaatctaaattaattagagactttataacagatagggatgataaatatttgatcattaagctattgcttcccggattagacgatagaatttataacatgaacgataaacaaattataaaattatatagtataatatttaaacaatctcaggaagatatgctacaagatttaggatacggatatataggagacactattaggactttcttcaaagaaaacacagaaatccgtccaagagataaaagcattttaactttagaagacgtggatagtttcttaactacgttatcatccgtaactaaagaatcgcatcaaataaaattattgactgatatcgcatccgtttgtacatgtaatgatttaaaatgtgtagtcatgcttattgataaagatctaaaaattaaagcgggtcctcggtacgtacttaacgctattagtcctaatgcctatgatgtgtttagaaaatctaataacttgaaagagataatagaaaattcatctaaacaaaatctagactctatatctatttctgttatgactccaattaatcccatgttagcggaatcgtgtgattctgtcaataaggcgtttaaaaaatttccatcaggaatgtttgcggaagtcaaatacgatggtgaaagagtacaagttcataaaaataataacgagtttgccttctttagtagaaacatgaaaccagtactctctcataaagtggattatctcaaagaatacataccgaaagcatttaaaaaagctacgtctatcgtattggattctgaaattgttcttgtagacgaacataatgtaccgctcccgtttggaagtttaggtatacacaaaaagaaagaatataaaaactctaacatgtgtttgttcgtgtttgactgtttgtactttgatggattcgatatgacggacattccattgtacgaacgaagatcttttctcaaagatgttatggttgaaatacccaatagaatagtattctcagagttgacgaatattagtaacgagtctcagttaactgacgtattggatgatgcactaacgagaaaattagaaggattggtcttaaaagatattaatggagtatacgaaccgggaaagagaagatggttaaaaataaagcgagactatttgaacgagggttccatggcagattctgccgatttagtagtactaggtgcctactatggtaaaggagcaaagggtggtatcatggcagtctttctaatgggttgttacgacgatgaatccggtaaatggaagacggtaactaaatgttccggtcacgatgataatacgttaagggttttgcaagaccaattaacgatgattaaaattaacaaggatcccaaaaaaattccagagtggttagtagttaataaaatctatattcccgattttgtagtagaggatccgaaacaatctcagatatgggaaatttcaggagcagagtttacatcttccaagtcccataccgcaaatggaatatccattagatttcctagatttactaggataagagaggataaaacgtggaaagaatctactcatctaaacgatttagtaaacttgactaaatcttaatagttacatacaaactgaaaattaaaataacaccatttagttggtggtcgccatggatggtgttattgtatactgtctaaacgcgttagtaaaacatggcgaggaaataaatcatataaaaaatgatttcatgattaaaccatgttgtgaaagagtttgtgaaaaagttaagaacgttcacattggcggacaatctaaaaacaatacagtgattgcagatttgccatatatggataatgctgtatcggatgtatgcaattcactgtataaaaagaatgtatcaagaatatccagatttgctaatttgataaagatagatgacgatgacaagactcctactggtgtatataattattttaaacctaaagatgttattcctgttatcatatctataggaaaggataaagatgtctgtgaactattaatctcatcagacatatcgtgtgcatgcgtggagttaaattcatataaagtagccattcttcccatggatgtttccttttttaccaaaggaaatgcatcattgattattctcctgtttgatttctctatcgatgcagcacctctcttaagaagtgtaaccgataataatgttattatatctagacaccagcgtctacatgacgagcttccgagttccaattggttcaagttttacataagtataaagtccgactattgttctatattatatatggttgttgatggatctgtgatgcatgcgatagctgataatagaactcacgcaattattagcaaaaatatattagacaatactacgattaacgatgagtgtagatgctgttattttgaaccacagattaggattcttgatagagatgagatgctcaatggatcatcgtgtgatatgaacagacattgtattatgatgaatttacctgatgtaggcgaatttggatctagtatgttggggaaatatgaacctgacatgattaagattgctctttcggtggctggtaatttaataagaaatcgagactacattcccgggagacgaggatatagctactacgtttacggtatagcctctagataatttttttaagcacgaaataaaaaacataattttaaaccaatctatttcatactattttgtgtgatcaccatggacataaagatagatattagtatttctggtgataaatttacggtgactactaggagggaaaatgaagaaagaaaaaaatatctacctctccaaaaagaaaaaactactgatgttatcaaacctgattatcttgagtacgatgacttgttagatagagatgagatgtctactattctagaggaatattttatgtacagaggtctattaggcctcagaataaaatatggacgactctttaacgaaattaaaaaattcgacaatgatgcggaagaacaattcggtactatagaagaactcaagcagaaacttagattaaattctgaagagggagcagataactttatagattatataaaggtacaaaaacaggatatcgtcaaacttactgtatacgattgcatatctatgataggattgtgtgcatgcgtggtagatgtttggagaaatgagaaactgttttctagatggaaatattgtttacgagctattaaactgtttattaatgatcacatgcttgataagataaaatctatactgcagaatagactagtatatgtggaaatgtcatagaaagttaaaagttaatgagagcaaaaatatataaggttgtattccatatttgttattttttctgtaatagttaaaaaaatacattcgatggtctatctatcagattattatgtgttataaggtactttttctcataataaactagagtatgagtaagatagtgtttttcaaaacatataaatctaaaattgatggatgagatatacagctattaatttcgaaaatatattttaatctgataactttaaacatggatttttgatggtggtttaacgttttaaaaaaagattttgttattgtagtatatgataatattaaaagatggatataaagaatttgctgactgcatgtactattttttacattactacattggctacggcagatatacctactccgccaccaacgggtcatgtgacaagggagaatatcttgataagaggcataatcaatgttgtaatcggtgtccacctggagaatttgccaaggttagatgtaatggtaacgataacacaaaatgtgaacgctgcccacctcatacatataccacaatcccaattattctaatggatgtcatcaatgtagaaaatgcccaacaggatcatttgataaggtaaagtgtaccggaacacagaacagtaaatgttcgtgtcttcctggttggtattgcgctactgattcttcacagactgaagattgttgaaattgtataccaaaaaggagatgtccatgcggatactttggtggaatagatgaacaaggaaatcctatttgtaaatcgtgttgtgttggtgaatattgcgactacctacgtaattatagacttgatccatttcctccatgcaaactatctaaatgtaattaattatgattttgatgataatgttaccatacattatatcgctacttggttagtgtattattcagtatgaagacctattaataattacttatcttttgacgatcttgttataattataatataaaaatacttatggcatagtaactcataattgctgacgcgataaattcgtaataatctgttttgttcaaaggaatctacaggcataaaaataaaaatataatttataatatactcttacaacgccatcatgaataacagcagtgaattgattgctgttattaatggatttagaaatagtggacgattttgtgatattaatatagttattaatgatgaaaggataaacgctcataaactcatcctatctggagcctccgaatatttttccattctgttttccaataattttatcgattctaatgaatacgaagttaatctaagtcatttagattatcaaagtgttaacgatttgatcgattacatttatgggatacctttgagcctaactaacgataacgtgaaatatattctttcaaccgctgattttttacaaattggatctgccattacggagtgtgaaaattacatacttaaaaatctttgttctaaaaactgtatcgatttctacatatacgctgataaatataataacaagaaaatagaatcagcgtcgtttaacacaatattacaaaatattttgagactcatcaacgatgaaaactttaaatacttaacagaggaatcaatgataaaaattttaagcgatgatatgttaaatataaaaaatgaggatttcgccccactaattctcattaaatggttagagagtactcaacaatcatgcaccgtcgagttacttaaatgcctcagaatatcattgctttccccacaagttataaaatcactttatagtcatcgactggttagttcaatctacgaatgtataacattcttaaacaatatagcattcttggatgaatcatttcctagataccatagcatcgagttgatatctatcggtataagtaattcgcgtgataaaatttccataaactgctacaatcataaaaaaaatacatgggaaatgatatcttcacgtagatataggtgtagtttcgcagtggccgtcctggataatattatttatatgatgggtggatatgatcagtccccgtatagaagttcaaaggttatagcgtacaatacatgtacaaattcttggatatatgatataccagagctaaaatatcctcgttctaattgtgggggactggctgatgacgaatacatttattgtataggcggcatacgcgatcaggattcatcgttgacatctagtattgataaatggaagccatcaaaaccatattggcagaagtatgctaaaatgcgcgaaccaaaatgtgatatgggggttgcgatgttaaacggattaatatatgttataggtggaatcgttaaaggtgacacgtgtaccgacgcactagagagtttatcagaagatggatggatgaagcatcaacgtcttccaataaaaatgtccaatatgtcgacgattgttcatgatggcaagatttatatatctggaggttacaacaatagtagtgtagttaatgtaatatcgaatctagtccttagctataatccgatatatgatgaatggaccaaattatcatcattaaacattcctagaattaatcccgctctatggtcagcgcataataaattatatgtaggaggaggaatatctgatgatgttcgaactaatacatctgaaacatacgataaagaaaaagattgttggacattggataatggtcacgtgttaccacgcaattatataatgtataaatgcgaaccgattaaacataaatatccattggaaaaaacacagtacacgaatgattttctaaagtatttggaaagttttataggtagttgatagaacaaaatacataattttgtaaaaataaatcactttttatactaatatgacacgattaccaatacttttgttactaatatcattagtatacgctacaccttttcctcagacatctaaaaaaataggtgatgatgcaactctatcatgtaatcgaaataatacaaatgactacgttgttatgagtgcttggtataaggagcccaattccattattcttttagctgctaaaagcgacgtcttgtattttgataattataccaaggataaaatatcttacgactctccatacgatgatctagttacaactatcacaattaaatcattgactgctagagatgccggtacttatgtatgtgcattctttatgacatcgcctacaaatgacactgataaagtagattatgaagaatactccacagagttgattgtaaatacagatagtgaatcgactatagacataatactatctggatctacacattcaccagaaactagttctgagaaacctgattatatagataattctaattgctcgtcggtattcgaaatcgcgactccggaaccaattactgataatgtagaagatcatacagacaccgtcacatacactagtgatagcattaatacagtaagtgcaacatctggagaatccacaacagacgagactccggaaccaattactgataaagaagaagatcatacagtcacagacactgtctcatacactacagtaagtacatcatctggaattgtcactactaaatcaaccaccgatgatgcggatctttatgatacgtacaatgataatgatacagtaccatcaactactgtaggtagtagtacaacctctattagtaattataaaaccaaggactttgtagaaatatttggtattaccgcattaattatattgtcggccgtggcaatattctgtattacgtattatatatgtaataaacgttcacgtaaatacaaaacagagaacaaagtctagatttttgacttacataaatgtctgggatagtaaaatctatcatattgagcggaccatctggttcaggaaagacagccatagccaaaagactatgggaatatatttggatttgtggtgtcccataccactagatttcctcgtcctatggaacgagaaggtgtcgattaccattacgttaacagagaggccatctggaagggaatagccgccggaaactttctagaacatactgagtttttaggaaatatttacggaacttctaaaactgctgtgaatacagcggctattaataatcgtatttgtgtgatggatttaaacatcgacggtgttagaagttttaaaaatacttacctaatgccttactcggtgtatataagacctacctctcttaaaatggttgagaccaagcttcgttgtagaaacactgaagctaacgatgagattcatcgtcgcgtgatattggcaaaaacggatatggatgaggccaacgaagcaggtctattcgacactattattattgaagatgatgtgaatttagcatatagtaagttaattcagatactacaggaccgtattagaatgtattttaacactaattaaagacttaagacttaaaacttgataattaataatataactcgtttttatatgtggctatttcaacgtctaatgtattagttaaatattaaaacttaccacgtaaaacttaaaatttaaaatgatatttcattgacagatagatcacacattatgaactttcaaggacttgtgttaactgacaattgcaaaaatcaatgggtcgttggaccattaataggaaaaggtggatttggtagtatttatactactaatgacaataattatgtagtaaaaatagagcccaaagctaacggatcattatttaccgaacaggcattttatactagagtacttaaaccatccgttatcgaagaatggaaaaaatctcacaatataaagcacgtaggtcttatcacgtgcaaggcatttggtctatacaaatccattaatgtggaatatagattcttggtaattaatagattaggtgtagatctagatgcggtgatcagagccaataataatagattaccaaaaaggtcggtgatgttgatcggaatcgaaatcttaaataccatacaatttatgcacgagcaaggatattctcacggagatattaaagcgagtaatatagtcttggatcaaatagataagaataaattatatctagtggattacggattggtttctaaattcatgtctaatggcgaacatgttccatttataagaaatccaaataaaatggataacggtactctagaatttacacctatagattcgcataaaggatacgttgtatctagacgtggagatctagaaacacttggatattgtatgattagatggttgggaggtatcttgccatggactaagatatctgaaacaaagaattgtgcattagtaagtgccacaaaacagaaatatgttaacaatactgcgactttgttaatgaccagtttgcaatatgcacctagagaattgctgcaatatattaccatggtaaactctttgacatattttgaggaacccaattacgacgagtttcggcacatattaatgcagggtgtatattattaagtgtggtgtttggtcgatgtaaaatttttgtcgataaaaattaaaaaataacttaatttattattgatctcgtgtgtacaaccgaaatcatggcgatgttttacgcacacgctctcggtgggtacgacgagaatcttcatgcctttcctggaatatcatcgactgttgccaatgatgtcaggaaatattctgttgtgtcagtttataataacaagtatgacattgtaaaagacaaatatatgtggtgttacagtcaggtgaacaagagatatattggagcactgctgcctatgtttgagtgcaatgaatatctacaaattggagatccgatccatgatcaagaaggaaatcaaatctctatcatcacatatcgccacaaaaactactatgctctaagcggaatcgggtacgagagtctagacttgtgtttggaaggagtagggattcatcatcacgtacttgaaacaggaaacgctgtatatggaaaagttcaacatgattattctactatcaaagagaaggccaaagaaatgagtacacttagtccaggacctataattgattaccacgtctggataggagattgtatctgtcaagttactgctgtggacgtacatggaaaggaaattatgagaatgagattcaaaaagggtgcggtgcttccgatcccaaatctggtaaaagttaaacttggggagaatgatacagaaaatctttcttctactatatcggcggcaccatcgaggtaaccacctctctggaagacagcgtgaataatgtactcatgaaacgtttggaaactatacgccatatgtggtctgttgtatatgatcattttgatattgtgaatggtaaagaatgctgttatgtgcatacgcattcatctaatcaaaatcctataccgagtactgtaaaaacaaatttgtacatgaagactatgggatcatgcattcaaatggattccatggaagctctagagtatcttagcgaactgaaggaatcaggtggatggagtcccagaccagaaatgcaggaatttgaatatccagatggagtggaagacactgaatcaattgagagattggtagaggagttcttcaatagatcagaacttcaggctggtaaattagtcaaatttggtaattctattaattgttaaacatacatctgtttcagctaagcaactaagaacacgtatacggcagcagcttcctttatactctcatcttttaccaacacaaagggtggatatttgttcattggagttgataataatacacacaaagtatttggattcacggtgggttacgactacctcagactggtagagaatgatatagaaaagcatatcaaaagactttgtgttgtgcatttctgtgagaagaaagaggacatcaagtacgcgtgtcgattcatcaaggtatataaacctggggatgaggctacctcgacatacgtgtgcgctatcaaagtggaaagatgctgttgtgctgtgtttgcagattggccagaatcatggtatatggatactaatggtatcaagaagtattctccagatgaatgggtgtcacatataaaattttaattaatgtaactatagagaacaaataataggttgtaatatcatatagacaataactaacaattaattagtaactgttatctcttttttaactaaccaactaactatatacctattaatacatcgtaattatagttcttaacatctattaatcattgattcgcttctttaattttttataaactaacattgttaattgaaaagggataacatgttacagaatataaattatatatggatttttttaaaaaggaaatacttgactggagtgtatatttatctcttcattatatagcacgcgtgtgttccaattcttccacatcccatataatacaggattataatctcattcgaacatacgagaaagtggataaaacaatagttgattttttatctaggttgccaaatttattccatattttagaatatggggaaaatattctacatatttattctatggatgatgctaatacgaatattataattttttttctagatagagtattaaatattaataagaacgggtcatttatacacaatctcaggttatcatcatccattaatataaaagaatatgtatatcaattagttaataatgatcatccagataataggataagactaatgcttgaaaatggacgtagaacaagacattttttgtcctatatatcagatacagttaatatctatatatgtattttaataaatcatggattttatatagatgccgaagacagttacggttgtacattattacatagatgtatatatcactataagaaatcagaatcagaatcatacaatgaattaattaagatattgttaaataatggatcagatgtagataaaaaagatacgtacggaaacacaccttttatcctattatgtaaacacgatatcaacaacgtggaattgtttgagatatgtttagagaatgctaatatagactctgtagactttaatagatatacacctcttcattatgtctcatgtcgtaataaatatgattttgtaaagttattaatttctaaaggagcaaatgttaatgcgcgtaataaattcggaactactccattttattgtggaattatacacggtatctcgcttataaaactatatttggaatcagacacagagttagaaatagataatgaacatatagttcgtcatttaataatttttgatgctgttgaatctttagattatctattatccagaggagttattgatattaactatcgtactatatacaacgaaacatctatttacgacgctgtcagttataatgcgtataatacgttggtctatctattaaacagaaatggtgattttgagacgattactactagtggatgtacatgtatttcggaagcagtcgcaaacaacaacaaaataataatggaagtactattgtctaaacgaccatctttgaaaattatgatacagtctatgatagcaattactaaaaataaacaacataatgcagatttattgaaaatgtgtataaaatatactgcgtgtatgaccgattatgatactcttatagatgtacagtcgctacagcaatataaatggtatattttaaaatgtttcgatgaaatagatatcatgaagagatgttatataaaaaataaaactgtattccaattagttttttgtatcaaagacattaatactttaatgagatacggtaaacatccttctttcgtgaagtgcactagtctcgacgtatacggaagtcgtgtacgtaatatcatagcatctattagatatcgtcagagattaattagtctattatccaagaagctggatgcgggagataaatggtcgtgttttcctaacgaaataaaatataaaatattggaaaactttaacgataacgaactgtccacatatctaaaaatcttataaacactattaaaatataaaatctaagtaggataaaatcacactacatcattgtttccttttagtgctcgacagtgtatactatttttaacactcataaataaaaatgaaaacgatttccgttgttacgttgttatgcgtactacctgctgttgtttattcaacatgtactgtacccactatgaataacgctaaattaacgtctaccgaaacatcgtttaataataaccagaaagttacgtttacatgtgatcagggatatcattcttcggatccaaatgctgtctgcgaaacagataaatggaaatacgaaaatccatgcaaaaaaatgtgcacagtttctgattacatctctgaactatataataaaccgctatacgaagtgaattccaccatgacactaagttgcaacggcgaaacaaaatattttcgttgcgaagaaaaaaatggaaatacttcttggaatgatactgttacgtgtcctaatgcggaatgtcaacctcttcaattagaacacggatcgtgtcaaccagttaaagaaaaatactcatttggggaatatatgactatcaactgtgatgttggatatgaggttattggtgcttcgtacataagttgtacagctaattcttggaatgttattccatcatgtcaacaaaaatgtgatataccgtctctatctaatggattaatttccggatctacattttctatcggtggcgttatacatcttagttgtaaaagtggttttatactaacgggatctccatcatccacatgtatcgacggtaaatggaatcccgtactcccaatatgtgtacgaactaacgaagaatttgatccagtggatgatggtcccgacgatgagacagatttgagcaaactctcgaaagacgttgtacaatatgaacaagaaatagaatcgttagaagcaacttatcatataatcatagtggcgttaacaattatgggcgtcatatttttaatctccgttatagtattagtttgttcctgtgacaaaaataatgaccaatataagttccataaattgctaccgtaaatataaatccgttaaaataattaataattaataattaataattaataacgaacaagtatcaaaagattaaagacttatagctagaatcaattgagatgtcttcttcagtggatgttgatatctacgatgccgttagagcatttttactcaggcactattataacaagagatttattgtgtatggaagaagtaacgccatattacataatatatacaggctatttacaagatgcgccgttataccgttcgatgatatagtacgtactatgccaaatgaatcacgtgttaaacaatgggtgatggatacacttaatggtataatgatgaatgaacgcgatgtttctgtaagcgttggcaccggaatactattcatggaaatgtttttcgattacaataaaaatagtatcaacaatcaactaatgtatgatataattaatagcgtatctataattctagctaatgagagatatagaagcgcttttaacgacgatggtatatacatccgtagaaatatgattaacaagttgtacggatacgcatctctaactactattggcacgatcgctggaggtgtttgttattatctgttgatgcatctagttagtttgtataaataattatttcaatatactagttaaaattttaagattttaaatgtataaaaaactaataacgtttttatttgtaataggtgcattagcatcctattcgaataatgagtacactccgtttaataaactgagtgtaaaactctatatagatggagtagataatatagaaaattcatatactgatgataataatgaattggtgttaaattttaaagagtacacaatttctattattacagagtcatgcgacgtcggatttgattccatagatatagatgttataaacgactataaaattattgatatgtataccattgactcgtctactattcaacgcagaggtcacacgtgtagaatatctaccaaattatcatgccattatgataagtacccttatattcacaaatatgatggtgatgagcgacaatattctattactgcagagggaaaatgctataaaggaataaaatatgaaataagtatgatcaacgatgatactctattgagaaaacatactcttaaaattggatctacttatatatttgatcgtcatggacatagtaatacatattattcaaaatatgatttttaaaaatttaaaatatattatcacttcagtgacagtagtcaaataacaaacaacaccatgagatatattataattctcgcagttttgttcattaatagtatacacgctaaaataactagttataagtttgaatccgtcaattttgattccaaaattgaatggactggggatggtctatacaatatatcccttaaaaattatggcatcaagacgtggcaaacaatgtatacaaatgtaccagaaggaacatacgacatatccgcatttccaaagaatgatttcgtatctttctgggttaaatttgaacaaggcgattataaagtggaagagtattgtacgggactatgcgtcgaagtaaaaattggaccaccgactgtaacattgactgaatacgacgaccatatcaatttgtacatcgagcatccgtatgctactagaggtagcaaaaagattcctatttacaaacgcggtgacatgtgtgatatctacttgttgtatacggctaacttcacattcggagattctgaagaaccagtaacatatgatatcgatgactacgattgcacgtctacaggttgcagcatagactttgccacaacagaaaaagtgtgcgtgacagcacagggagccacagaagggtttctcgaaaaaattactccatggagttcggaagtatgtctgacacctaaaaagaatgtatatacatgtgcaattagatccaaagaagatgttcccaatttcaaggacaaaatggccagagttatcaagagaaaatttaataaacagtctcaatcttatttaactaaatttctcggtagcacatcaaatgatgttaccacttttcttagcatgcttaacttgactaaatattcataactaatttttattaatgatacaaaaacgaaataaaactgcatattatacactggttaacgcccttataggctctaaccattttcaagatgaggtccctgattatagtccttctgttcccctctatcatctactccatgtctattagacgatgtgagaagactgaagaggaaacatggggattgaaaatagggttgtgtataattgccaaagatttctatcccgaaagaactgattgcagtgttcatctcccaactgcaagtgaaggattgataactgaaggcaatggattcagggatatacgaaacaccgataaattataaaaaaagcaatgtgtccgctgtttccgttaataatactattttcgtaactggcggattattcataaataactctaatagcacgatcgtggttaacaatatggaaaaacttgacatttataaagacaaacaatggtcgattatagaaatgcctatggctagggtatatcacggcatcgactcgacatttggaatgttatattttgccggaggtctatccgttaccgaacaatatggtaatttagagaaaaacaacgagatatcttgttacaatcctagaacgaataagtggtttgatatttcatatactatttataagatatccatatcatcattgtgtaaactaaataacgtcttctatgtatttagtaaggacattggatatgtggaaaagtatgatggtgcatggaagttagtacatgatcgtctccccgctataaaggcattatcaacttctccttattgattgaaaatgaaaatataaatagtttttatgtatagcagtattaccctatagttttattgcttactactaacatggatacagatacagatacagatacagatacagatacagatacagatacagatacagatgttacaaatgtagaagatatcataaatgaaatagatagagagaaagaagaaatactaaaaaatgtagaaattgaaaataataaaaacattaacaagaatcatccaagtggatatattagagaagcactcgttattaatacaagtagtaatagtgattccattgataaagaagttatagaatgtatcagtcacgatgtaggaatatagatcatatctactaatttttataatcaatacaaaacataaaaaacaactcgttattacatagcaggcatggaatccttcaagtattgttttgataacgatggcaagaaatggattatcggaaatactttatattctggtaattcaatactctataaggtcagaaaaaatttcactagttcgttctacaattacgtaatgaagatagatcacaaatcacacaagccattgttgtctgaaatacgattctatatatctgtattggatcctttgactatcgacaactggacacgggaacgtggtataaagtatttggctattccagatctgtatggaattggagaaaccgatgattatatgttcttcgttataaagaatttgggaagagtattcgccccaaaggatactgaatcagtcttcgaagcatgtgtcactatgataaacacgttagagtttatacactctcgaggatttacccatggaaaaatagaaccgaggaatatactgattagaaataaacgtctttcactaattgactattctagaactaacaaactatacaagagtggaaactcacatatagattacaacgaggacatgataacttcaggaaatatcaattatatgtgtgtagacaatcatcttggagcaacagtttcaagacgaggagatttagaaatgttgggatattgcatgatagaatggttcggtggcaaacttccatggaaaaacgaaagtagtataaaagtaataaaacaaaaaaaagaatataaaaaatttatagctactttctttgaggactgttttcctgaaggaaatgaacctctggaattagttagatatatagaattagtatacacgttagattattctcaaactcctaattatgacagactacgtagactgtttatacaagattgaaattatattctttttttatagagtgtggtagtgttacggatatctaatattaatattagactatctctatcgcgctacacgaccaatatcgattactatgaatatcttctatgaaaggagagaatgtattcatttctccagcgtcaatctcgtcagtattgacaatactgtattatggagctaatggatccactgctgaacagctatcaaaatatgtagaaacggaggagaacacggataaggttagcgctcagaatatctcattcaaatccataaataaagtatatgggcgatattctgccgtgtttaaagatttctttttgggaaaaattggcgataagtttcaaactgttgacttcactgattgtcgcactatagatgcaatcaacaagtgtgtagatatctttactgaggggaaaatcaatccactattggatgaaccattgtctcctagcaattagtgccgtatactttaaagcaaaatggttgacgccattcgaaaaggaatttaccagtgattatcccttttacgtatcaccaacggaaatggtagatgtaagtatgatgtctatgtacggcgagctatttaatcacgcatctgtaaaggaatcattcggcaacttttcaatcatagaactgccatatgttggagatactagtatgatggtcattcttccagacaagattgatggattagaatccatagaacaaaatctaacagatacaaattttaagaaatggtgtaactctctggatgctatgtttatagatgttcacattcccaagtttaaggtaacaggctcgtataatctggtggatactctagtaaagatccgctgatggaaacacagtgaatgctagattgtccagcgtgtccccaggacaaggtaaggactctcccgcgatcactcgtgaagaagctctggctatgatcaaagactgtgaggtgtctatcgacatcagatgtagcgaagaagagaaagacagcgacatcaagacccatccagtactcgggtctaacatctctcataagaaagtgagttacgaagatatcatcggttcaacgatcgtcgatacaaaatgtgtcaagaatctagagtttagcgttcgtatcggagacatgtgcaaggaatcatctgaacttgaggtcaaggatggattcaagtatgtcgacggatcggcatctgaaggtgcaaccgatgatacttcactcatcgattcaacaaaactcaaagcgtgtgtctga

SEQ ID NO: 625 - protein, 295 aa, Vaccinia virus
YFASFMELENEPVILPCPQINTLSSGYNILDILWEKRGADNDRIIPIDNGSNMLILNPTQSDSGIYICITTNETYCDMMSLNLTIVSVSESNIDFISYPQIVNERSTGEMVCPNINAFIASNVNADIIWSGHRRLRNKRLKQRTPGIITIEDVRKNDAGYYTCVLEYIYGGKTYNVTRIVKLEVRDKIIHPTMQLPEGVVTSIGSNLTIACRVSLRPPTTDADVFWISNGMYYEEDDGDGDGRISVANKIYMTDKRRVITSRLNINPVKEEDATTFTCMAFTIPSISKTVTVSIT

SEQ ID NO: 626 - DNA, 185 bp, Artificial Sequence
  Description of Artificial Sequence: Synthetic oligonucleotide
ttaaagttacaaacaactaggaaattggtttatgatgtataatttttttagtttttatagattctttattctatacttaaaaaatgaaaataaatacaaaggttcttgagggttgtgttaaattgaaagcgagaaataatcataaattatttcattatcgcgatatccgttaagtttgtatcgta

SEQ ID NO: 627 - protein, 9 aa, Artificial Sequence
  Description of Artificial Sequence: Synthetic peptide
MLGTHTMEV

SEQ ID NO: 628 - protein, 9 aa, Artificial Sequence
  Description of Artificial Sequence: Synthetic peptide
VLPDVFIRC

SEQ ID NO: 629 - protein, 37 aa, Artificial Sequence
  Description of Artificial Sequence: Synthetic peptide
MLNFSLCLYPVFILNKLVLRTQSIILHTINNASIKNR

SEQ ID NO: 630 - DNA, 15 bp, Artificial Sequence
  Description of Artificial Sequence: Synthetic oligonucleotide
aaaaatgaaaataaa

SEQ ID NO: 631 - DNA, 5 bp, Artificial Sequence
  Description of Artificial Sequence: Synthetic oligonucleotide
taaat

SEQ ID NO: 632 - DNA, 44 bp, Artificial Sequence
  Description of Artificial Sequence: Synthetic oligonucleotide
tcttgagggttgtgttaaattgaaagcgagaaataatcataaat

What is claimed is:

1. A nucleic acid comprising a recombinant vaccinia virus genome, comprising:
(a) a vaccinia virus nucleotide sequence of SEQ ID NO: 210, which comprises partial C2L, F3L, B14R, and B29R vaccinia genes and which comprises a deletion in the B8R gene;
(b) a first transgene comprising a first nucleotide sequence encoding an antibody that specifically binds to Cytotoxic T-lymphocyte Associated Protein 4 (CTLA-4), wherein the first nucleotide sequence is set forth in SEQ ID NO: 214;
(c) a second transgene comprising a second nucleotide sequence encoding an Interleukin 12 (IL-12) polypeptide, wherein the second nucleotide sequence is set forth in SEQ ID NO: 215; and
(d) a third transgene comprising a third nucleotide sequence encoding FMS-like tyrosine kinase 3 ligand (FLT3L), wherein the third nucleotide sequence is set forth in SEQ ID NO: 216.

2. The nucleic acid of claim 1, wherein the first nucleotide sequence is in the same orientation as endogenous vaccinia virus genes that flank the first nucleotide sequence, the second nucleotide sequence is in the same orientation as endogenous vaccinia virus genes that flank the second nucleotide sequence, and the third nucleotide sequence is in the same orientation as endogenous vaccinia virus genes that flank the third nucleotide sequence.

3. The nucleic acid of claim 1 or 2, further comprising a nucleotide sequence comprising at least one promoter operably linked to the first nucleotide sequence encoding the anti-CTLA-4 antibody.

4. The nucleic acid of claim 3, wherein the at least one promoter operably linked to the first nucleotide sequence encoding the anti-CTLA-4 antibody is an H5R promoter, a pS promoter, or a LEO promoter.

5. The nucleic acid of claim 3, wherein the at least one promoter operably linked to the first nucleotide sequence encoding the anti-CTLA-4 antibody is an H5R promoter.

6. The nucleic acid of any one of claims 1-5, further comprising a nucleotide sequence comprising at least one promoter operably linked to the second nucleotide sequence encoding the IL-12 polypeptide.

7. The nucleic acid of claim 6, wherein the at least one promoter operably linked to the second nucleotide sequence encoding the IL-12 polypeptide is a late promoter.

8. The nucleic acid of claim 7, wherein the late promoter comprises the nucleotide sequence of SEQ ID NO: 561, an F17R promoter, or a D13L promoter.

9. The nucleic acid of claim 7, wherein the late promoter comprises the nucleotide sequence of SEQ ID NO: 561.

10. The nucleic acid of any one of claims 1-9, further comprising a nucleotide sequence comprising at least one promoter operably linked to the third nucleotide sequence encoding FLT3L.

11. The nucleic acid of claim 10, wherein the at least one promoter operably linked to the third nucleotide sequence encoding FLT3L is a B8R promoter, a B19R promoter, a E3L promoter, an F11L promoter, or a B2R promoter.

12. The nucleic acid of claim 10, wherein the at least one promoter operably linked to the third nucleotide sequence encoding FLT3L is a B8R promoter.

13. The nucleic acid of claim 10, wherein the at least one promoter operably linked to the third nucleotide sequence encoding FLT3L is a B19R promoter.

14. The nucleic acid of claim 10, wherein the at least one promoter operably linked to the third nucleotide sequence encoding FLT3L is a B8R promoter and a B19R promoter.

15. The nucleic acid of any one of claims 1-14, wherein the first transgene is present between the partial C2L and F3L vaccinia genes in SEQ ID NO: 210.

16. The nucleic acid of any one of claims 1-14, wherein the second transgene is present between the partial C2L and F3L vaccinia genes in SEQ ID NO: 210.

17. The nucleic acid of any one of claims 1-14, wherein the third transgene is present between the partial C2L and F3L vaccinia genes in SEQ ID NO: 210.

18. The nucleic acid of any one of claims 1-14, wherein the first transgene is present in the locus of the deletion in the B8R gene.

19. The nucleic acid of any one of claims 1-14, wherein the second transgene is present in the locus of the deletion in the B8R gene.

20. The nucleic acid of any one of claims 1-14, wherein the third transgene is present in the locus of the deletion in the B8R gene.

21. The nucleic acid of any one of claims 1-14, wherein the first transgene is present between the partial B14R and B29R vaccinia genes in SEQ ID NO: 210.

22. The nucleic acid of any one of claims 1-14, wherein the second transgene is present between the partial B14R and B29R vaccinia genes in SEQ ID NO: 210.

23. The nucleic acid of any one of claims 1-14, wherein the third transgene is present between the partial B14R and B29R vaccinia genes in SEQ ID NO: 210.

24. The nucleic acid of any one of claims 1-14, wherein the first transgene and the second transgene are present between the partial C2L and F3L vaccinia genes in SEQ ID NO: 210.

25. The nucleic acid of any one of claims 1-14, wherein the first transgene and the second transgene are present in the locus of the deletion in the B8R gene.

26. The nucleic acid of any one of claims 1-14, wherein the first transgene and the second transgene are present between the partial B14R and B29R vaccinia genes in SEQ ID NO: 210.

27. The nucleic acid of any one of claims 1-14, wherein the first transgene and the third transgene are present between the partial C2L and F3L vaccinia genes in SEQ ID NO: 210.

28. The nucleic acid of any one of claims 1-14, wherein the first transgene and the third transgene are present in the locus of the deletion in the B8R gene.

29. The nucleic acid of any one of claims 1-14, wherein the first transgene and the third transgene are present between the partial B14R and B29R vaccinia genes in SEQ ID NO: 210.

30. The nucleic acid of any one of claims 1-14, wherein the second transgene and the third transgene are present between the partial C2L and F3L vaccinia genes in SEQ ID NO: 210.

31. The nucleic acid of any one of claims 1-14, wherein the second transgene and the third transgene are present in the locus of the deletion in the B8R gene.

32. The nucleic acid of any one of claims 1-14, wherein the second transgene and the third transgene are present between the partial B14R and B29R vaccinia genes in SEQ ID NO: 210.

33. The nucleic acid of any one of claims 1-14, wherein the first transgene is present between the partial C2L and F3L vaccinia genes in SEQ ID NO: 210, and the second transgene is present in the locus of the deletion in the B8R gene.

34. The nucleic acid of any one of claims 1-14, wherein the second transgene is present between the partial C2L and F3L vaccinia genes in SEQ ID NO: 210, and the first transgene is present in the locus of the deletion in the B8R gene.

35. The nucleic acid of any one of claims 1-14, wherein the first transgene is present between the partial C2L and F3L vaccinia genes in SEQ ID NO: 210, and the third transgene is present in the locus of the deletion in the B8R gene.

36. The nucleic acid of any one of claims 1-14, wherein the third transgene is present between the partial C2L and F3L vaccinia genes in SEQ ID NO: 210, and the first transgene is present in the locus of the deletion in the B8R gene.

37. The nucleic acid of any one of claims 1-14, wherein the second transgene is present between the partial C2L and F3L vaccinia genes in SEQ ID NO: 210, and the third transgene is present in the locus of the deletion in the B8R gene.

38. The nucleic acid of any one of claims 1-14, wherein the third transgene is present between the partial C2L and F3L vaccinia genes in SEQ ID NO: 210, and the second transgene is present in the locus of the deletion in the B8R gene.

39. The nucleic acid of any one of claims 1-14, wherein the first transgene is present between the partial C2L and F3L vaccinia genes in SEQ ID NO: 210, and the second transgene is present between the partial B14R and B29R vaccinia genes in SEQ ID NO: 210.

40. The nucleic acid of any one of claims 1-14, wherein the second transgene is present between the partial C2L and F3L vaccinia genes in SEQ ID NO: 210, and the first transgene is present between the partial B14R and B29R vaccinia genes in SEQ ID NO: 210.

41. The nucleic acid of any one of claims 1-14, wherein the first transgene is present between the partial C2L and F3L vaccinia genes in SEQ ID NO: 210, and the third transgene is present between the partial B14R and B29R vaccinia genes in SEQ ID NO: 210.

42. The nucleic acid of any one of claims 1-14, wherein the third transgene is present between the partial C2L and F3L vaccinia genes in SEQ ID NO: 210, and the first transgene is present between the partial B14R and B29R vaccinia genes in SEQ ID NO: 210.

43. The nucleic acid of any one of claims 1-14, wherein the second transgene is present between the partial C2L and F3L vaccinia genes in SEQ ID NO: 210, and the third transgene is present between the partial B14R and B29R vaccinia genes in SEQ ID NO: 210.

44. The nucleic acid of any one of claims 1-14, wherein the third transgene is present between the partial C2L and F3L vaccinia genes in SEQ ID NO: 210, and the second transgene is present between the partial B14R and B29R vaccinia genes in SEQ ID NO: 210.

45. The nucleic acid of any one of claims 1-14, wherein the first transgene is present in the locus of the deletion in the B8R gene, and the second transgene is present between the partial B14R and B29R vaccinia genes in SEQ ID NO: 210.

46. The nucleic acid of any one of claims 1-14, wherein the second transgene is present in the locus of the deletion in the B8R gene, and the first transgene is present between the partial B14R and B29R vaccinia genes in SEQ ID NO: 210.

47. The nucleic acid of any one of claims 1-14, wherein the first transgene is present in the locus of the deletion in the B8R gene, and the third transgene is present between the partial B14R and B29R vaccinia genes in SEQ ID NO: 210.

48. The nucleic acid of any one of claims 1-14, wherein the third transgene is present in the locus of the deletion in the B8R gene, and the first transgene is present between the partial B14R and B29R vaccinia genes in SEQ ID NO: 210.

49. The nucleic acid of any one of claims 1-14, wherein the second transgene is present in the locus of the deletion in the B8R gene, and the third transgene is present between the partial B14R and B29R vaccinia genes in SEQ ID NO: 210.

50. The nucleic acid of any one of claims 1-14, wherein the third transgene is present in the locus of the deletion in the B8R gene, and the second transgene is present between the partial B14R and B29R vaccinia genes in SEQ ID NO: 210.

51. The nucleic acid of any one of claims 1-14, wherein the first transgene, the second transgene, and the third transgene are present between the partial C2L and F3L vaccinia genes in SEQ ID NO: 210.

52. The nucleic acid of any one of claims 1-14, wherein the first transgene, the second transgene, and the third transgene are present in the locus of the deletion in the B8R gene.

53. The nucleic acid of any one of claims 1-14, wherein the first transgene, the second transgene, and the third transgene are present between the partial B14R and B29R vaccinia genes in SEQ ID NO: 210.

54. The nucleic acid of any one of claims 1-14, wherein the first transgene is present between the partial C2L and F3L vaccinia genes in SEQ ID NO: 210, and the second transgene and the third transgene are present in the locus of the deletion in the B8R gene.

55. The nucleic acid of any one of claims 1-14, wherein the second transgene is present between the partial C2L and F3L vaccinia genes in SEQ ID NO: 210, and the first transgene and the third transgene are present in the locus of the deletion in the B8R gene.

56. The nucleic acid of any one of claims 1-14, wherein the third transgene is present between the partial C2L and F3L vaccinia genes in SEQ ID NO: 210, and the first transgene and the second transgene are present in the locus of the deletion in the B8R gene.

57. The nucleic acid of any one of claims 1-14, wherein the first transgene and the second transgene are present between the partial C2L and F3L vaccinia genes in SEQ ID NO: 210, and the third transgene is present in the locus of the deletion in the B8R gene.

58. The nucleic acid of any one of claims 1-14, wherein the first transgene and the third transgene are present between the partial C2L and F3L vaccinia genes in SEQ ID NO: 210, and the second transgene is present in the locus of the deletion in the B8R gene.

59. The nucleic acid of any one of claims 1-14, wherein the second transgene and the third transgene are present between the partial C2L and F3L vaccinia genes in SEQ ID NO: 210, and the first transgene is present in the locus of the deletion in the B8R gene.

60. The nucleic acid of any one of claims 1-14, wherein the first transgene is present between the partial C2L and F3L vaccinia genes in SEQ ID NO: 210, and the second transgene and the third transgene are present between the partial B14R and B29R vaccinia genes in SEQ ID NO: 210.

61. The nucleic acid of any one of claims 1-14, wherein the second transgene is present between the partial C2L and F3L vaccinia genes in SEQ ID NO: 210, and the first transgene and the third transgene are present between the partial B14R and B29R vaccinia genes in SEQ ID NO: 210.

62. The nucleic acid of any one of claims 1-14, wherein the third transgene is present between the partial C2L and F3L vaccinia genes in SEQ ID NO: 210, and the first transgene and the second transgene are present between the partial B14R and B29R vaccinia genes in SEQ ID NO: 210.

63. The nucleic acid of any one of claims 1-14, wherein the first transgene and the second transgene are present between the partial C2L and F3L vaccinia genes in SEQ ID NO: 210, and the third transgene is present between the partial B14R and B29R vaccinia genes in SEQ ID NO: 210.

64. The nucleic acid of any one of claims 1-14, wherein the first transgene and the third transgene are present between the partial C2L and F3L vaccinia genes in SEQ ID NO: 210, and the second transgene is present between the partial B14R and B29R vaccinia genes in SEQ ID NO: 210.

65. The nucleic acid of any one of claims 1-14, wherein the second transgene and the third transgene are present between the partial C2L and F3L vaccinia genes in SEQ ID NO: 210, and the first transgene is present between the partial B14R and B29R vaccinia genes in SEQ ID NO: 210.

66. The nucleic acid of any one of claims 1-14, wherein the first transgene is present in the locus of the deletion in the B8R gene, and the second transgene and the third transgene are present between the partial B14R and B29R vaccinia genes in SEQ ID NO: 210.

67. The nucleic acid of any one of claims 1-14, wherein the second transgene is present in the locus of the deletion in the B8R gene, and the first transgene and the third transgene are present between the partial B14R and B29R vaccinia genes in SEQ ID NO: 210.

68. The nucleic acid of any one of claims 1-14, wherein the third transgene is present in the locus of the deletion in the B8R gene, and the first transgene and the second transgene are present between the partial B14R and B29R vaccinia genes in SEQ ID NO: 210.

69. The nucleic acid of any one of claims 1-14, wherein the first transgene and the second transgene are present in the locus of the deletion in the B8R gene, and the third transgene is present between the partial B14R and B29R vaccinia genes in SEQ ID NO: 210.

70. The nucleic acid of any one of claims 1-14, wherein the first transgene and the third transgene are present in the locus of the deletion in the B8R gene, and the second transgene is present between the partial B14R and B29R vaccinia genes in SEQ ID NO: 210.

71. The nucleic acid of any one of claims 1-14, wherein the second transgene and the third transgene are present in the locus of the deletion in the B8R gene, and the first transgene is present between the partial B14R and B29R vaccinia genes in SEQ ID NO: 210.

72. The nucleic acid of any one of claims 1-14, wherein the first transgene is present between the partial C2L and F3L vaccinia genes in SEQ ID NO: 210, the second transgene is present in the locus of the deletion in the B8R gene, and the third transgene is present between the partial B14R and B29R vaccinia genes in SEQ ID NO: 210.

73. The nucleic acid of any one of claims 1-14, wherein the first transgene is present between the partial C2L and F3L vaccinia genes in SEQ ID NO: 210, the third transgene is present in the locus of the deletion in the B8R gene, and the second transgene is present between the partial B14R and B29R vaccinia genes in SEQ ID NO: 210.

74. The nucleic acid of any one of claims 1-14, wherein the second transgene is present between the partial C2L and F3L vaccinia genes in SEQ ID NO: 210, the first transgene is present in the locus of the deletion in the B8R gene, and the third transgene is present between the partial B14R and B29R vaccinia genes in SEQ ID NO: 210.

75. The nucleic acid of any one of claims 1-14, wherein the second transgene is present between the partial C2L and F3L vaccinia genes in SEQ ID NO: 210, the third transgene is present in the locus of the deletion in the B8R gene, and the first transgene is present between the partial B14R and B29R vaccinia genes in SEQ ID NO: 210.

76. The nucleic acid of any one of claims 1-14, wherein the third transgene is present between the partial C2L and F3L vaccinia genes in SEQ ID NO: 210, the first transgene is present in the locus of the deletion in the B8R gene, and the second transgene is present between the partial B14R and B29R vaccinia genes in SEQ ID NO: 210.

77. The nucleic acid of any one of claims 1-14, wherein the third transgene is present between the partial C2L and F3L vaccinia genes in SEQ ID NO: 210, the second transgene is present in the locus of the deletion in the B8R gene, and the first transgene is present between the partial B14R and B29R vaccinia genes in SEQ ID NO: 210.

78. A nucleic acid comprising a recombinant vaccinia virus genome, comprising:
(a) a vaccinia virus nucleotide sequence of SEQ ID NO: 210, which comprises partial C2L, F3L, B14R, and B29R vaccinia genes and which comprises a deletion in the B8R gene;
(b) a first transgene comprising a first nucleotide sequence encoding an antibody that specifically binds to CTLA-4, wherein the first nucleotide sequence is set forth in SEQ ID NO: 214;
(c) a second transgene comprising a second nucleotide sequence encoding an IL-12 polypeptide, wherein the second nucleotide sequence is set forth in SEQ ID NO: 215; and
(d) a third transgene comprising a third nucleotide sequence encoding FLT3L, wherein the third nucleotide sequence is set forth in SEQ ID NO: 216;
wherein the nucleic acid further comprises:
(i) a nucleotide sequence comprising at least one promoter operably linked to the first nucleotide sequence, wherein the at least one promoter operably linked to the first nucleotide sequence is an H5R promoter;
(ii) a nucleotide sequence comprising at least one promoter operably linked to the second nucleotide sequence, wherein the at least one promoter operably linked to the second nucleotide sequence is a late promoter that comprises the nucleotide sequence of SEQ ID NO: 561; and
(iii) a nucleotide sequence comprising at least one promoter operably linked to the third nucleotide sequence, wherein the at least one promoter operably linked to the third nucleotide sequence is a B8R promoter and a B19R promoter.

79. The nucleic acid of claim 78, wherein the first nucleotide sequence is in the same orientation as endogenous vaccinia virus genes that flank the first nucleotide sequence, the second nucleotide sequence is in the same orientation as endogenous vaccinia virus genes that flank the second nucleotide sequence, and the third nucleotide sequence is in the same orientation as endogenous vaccinia virus genes that flank the third nucleotide sequence.

80. The nucleic acid of claim 78 or 79, wherein the first transgene is present between the partial C2L and F3L vaccinia genes in SEQ ID NO: 210, and the second transgene and the third transgene are present in the locus of the deletion in the B8R gene.

81. The nucleic acid of claim 78 or 79, wherein the first transgene is present between the partial B14R and B29R vaccinia genes in SEQ ID NO: 210, and the second transgene and the third transgene are present in the locus of the deletion in the B8R gene.

82. The nucleic acid of claim 80 or 81, wherein the third transgene is upstream of the second transgene.

83. The nucleic acid of claim 80 or 81, wherein the third transgene is downstream of the second transgene.

84. A nucleic acid comprising a recombinant vaccinia virus genome, comprising:
(a) a vaccinia virus nucleotide sequence of SEQ ID NO: 210, which comprises partial C2L, F3L, B14R, and B29R vaccinia genes and which comprises a deletion in the B8R gene;
(b) a first transgene comprising a first nucleotide sequence encoding an antibody that specifically binds to CTLA-4, wherein the first nucleotide sequence is set forth in SEQ ID NO: 214, and wherein the first nucleotide sequence is in the same orientation as endogenous vaccinia virus genes that flank the first nucleotide sequence and the first transgene is present between the partial C2L and F3L vaccinia genes the vaccinia virus nucleotide sequence of SEQ ID NO: 210;
(c) a second transgene comprising a second nucleotide sequence encoding an IL-12 polypeptide, wherein the second nucleotide sequence is set forth in SEQ ID NO: 215, and wherein the second nucleotide sequence is in the same orientation as endogenous vaccinia virus genes that flank the second nucleotide sequence and the second transgene is present in the locus of the deletion in the B8R gene of the vaccinia virus nucleotide sequence of SEQ ID NO: 210; and
(d) a third transgene comprising a third nucleotide sequence encoding FLT3L, wherein the third nucleotide sequence is set forth in SEQ ID NO: 216, wherein the third nucleotide sequence is in the same orientation as endogenous vaccinia virus genes that flank the third nucleotide sequence and the third transgene is present in the locus of the deletion in the B8R gene of the vaccinia virus nucleotide sequence of SEQ ID NO: 210, and wherein the third transgene is upstream of the second transgene;
wherein the nucleic acid further comprises:
(i) a nucleotide sequence comprising at least one promoter operably linked to the first nucleotide sequence, wherein the at least one promoter operably linked to the first nucleotide sequence is an H5R promoter;
(ii) a nucleotide sequence comprising at least one promoter operably linked to the second nucleotide sequence, wherein the at least one promoter operably linked to the second nucleotide sequence is a late promoter that comprises the nucleotide sequence of SEQ ID NO: 561; and
(iii) a nucleotide sequence comprising at least one promoter operably linked to the third nucleotide sequence, wherein the at least one promoter operably linked to the third nucleotide sequence is a B8R promoter or a B19R promoter.

85. The nucleic acid of claim 84, wherein the at least one promoter operably linked to the third nucleotide sequence is a B8R promoter and a B19R promoter.

86. The nucleic acid of claim 85, wherein the B8R promoter comprises the nucleotide sequence of SEQ ID NO: 564 and the B19R promoter comprises the nucleotide sequence of SEQ ID NO: 565.

87. The nucleic acid of any one of claims 84-86, wherein the at least one promoter operatively linked to the first nucleotide sequence is an H5R early promoter or an H5R late promoter.

88. The nucleic acid of claim 87, wherein the at least one promoter operatively linked to the first nucleotide sequence is an H5R early promoter and an H5R late promoter.

89. The nucleic acid of claim 88, wherein the H5R early promoter comprises the nucleotide sequence of SEQ ID NO: 553 and the H5R late promoter comprises the nucleotide sequence of SEQ ID NO: 554.

90. A nucleic acid comprising a recombinant vaccinia virus genome, comprising:
(a) a vaccinia virus nucleotide sequence of SEQ ID NO: 210, which comprises partial C2L, F3L, B14R, and B29R vaccinia genes and which comprises a deletion in the B8R gene;
(b) a first transgene comprising a first nucleotide sequence encoding an antibody that specifically binds to CTLA-4, wherein the first nucleotide sequence is set forth in SEQ ID NO: 214, and wherein the first nucleotide sequence is in the same orientation as endogenous vaccinia virus genes that flank the first nucleotide sequence and the first transgene is present between the partial C2L and F3L vaccinia genes of the vaccinia virus nucleotide sequence of SEQ ID NO: 210;
(c) a second transgene comprising a second nucleotide sequence encoding an IL-12 polypeptide, wherein the second nucleotide sequence is set forth in SEQ ID NO: 215, and wherein the second nucleotide sequence is in the same orientation as endogenous vaccinia virus genes that flank the second nucleotide sequence and the second transgene is present in the locus of the deletion in the B8R gene of the vaccinia virus nucleotide sequence of SEQ ID NO: 210; and
(d) a third transgene comprising a third nucleotide sequence encoding FLT3L, wherein the third nucleotide sequence is set forth in SEQ ID NO: 216, wherein the third nucleotide sequence is in the same orientation as endogenous vaccinia virus genes that flank the third nucleotide sequence and the third transgene is present in the locus of the deletion in the B8R gene of the vaccinia virus nucleotide sequence of SEQ ID NO: 210, and wherein the third transgene is downstream of the second transgene;
wherein the nucleic acid further comprises:
(i) a nucleotide sequence comprising at least one promoter operably linked to the first nucleotide sequence, wherein the at least one promoter operably linked to the first nucleotide sequence is an H5R promoter;
(ii) a nucleotide sequence comprising at least one promoter operably linked to the second nucleotide sequence, wherein the at least one promoter operably linked to the second nucleotide sequence is a late promoter that comprises the nucleotide sequence of SEQ ID NO: 561; and
(iii) a nucleotide sequence comprising at least one promoter operably linked to the third nucleotide sequence, wherein the at least one promoter operably linked to the third nucleotide sequence is a B8R promoter or a B19R promoter.

91. The nucleic acid of claim 90, wherein the at least one promoter operably linked to the third nucleotide sequence is a B8R promoter and a B19R promoter.

92. The nucleic acid of claim 91, wherein the B8R promoter comprises the nucleotide sequence of SEQ ID NO: 564 and the B19R promoter comprises the nucleotide sequence of SEQ ID NO: 565.

93. The nucleic acid of any one of claims 90-92, wherein the at least one promoter operatively linked to the first nucleotide sequence is an H5R early promoter or an H5R late promoter.

94. The nucleic acid of claim 93, wherein the at least one promoter operatively linked to the first nucleotide sequence is an H5R early promoter and an H5R late promoter.

95. The nucleic acid of claim 94, wherein the H5R early promoter comprises the nucleotide sequence of SEQ ID NO: 553 and the H5R late promoter comprises the nucleotide sequence of SEQ ID NO: 554.

96. A nucleic acid comprising a recombinant vaccinia virus genome, comprising:
(a) a vaccinia virus nucleotide sequence of SEQ ID NO: 210, which comprises partial C2L, F3L, B14R, and B29R vaccinia genes and which comprises a deletion in the B8R gene;
(b) a first transgene comprising a first nucleotide sequence encoding an antibody that specifically binds to CTLA-4, wherein the first nucleotide sequence is set forth in SEQ ID NO: 214, and wherein the first nucleotide sequence is in the same orientation as endogenous vaccinia virus genes that flank the first nucleotide sequence and the first transgene is present between the partial B14R and B29R vaccinia genes in SEQ ID NO: 210;
(c) a second transgene comprising a second nucleotide sequence encoding an IL-12 polypeptide, wherein the second nucleotide sequence is set forth in SEQ ID NO: 215, and wherein the second nucleotide sequence is in the same orientation as endogenous vaccinia virus genes that flank the second nucleotide sequence and the second transgene is present in the locus of the deletion in the B8R gene of the vaccinia virus nucleotide sequence of SEQ ID NO: 210; and
(d) a third transgene comprising a third nucleotide sequence encoding FLT3L, wherein the third nucleotide sequence is set forth in SEQ ID NO: 216, wherein the third nucleotide sequence is in the same orientation as endogenous vaccinia virus genes that flank the third nucleotide sequence and the third transgene is present in the locus of the deletion in the B8R gene of the vaccinia virus nucleotide sequence of SEQ ID NO: 210, and wherein the third transgene is upstream of the second transgene;
wherein the nucleic acid further comprises:
(i) a nucleotide sequence comprising at least one promoter operably linked to the first nucleotide sequence, wherein the at least one promoter operably linked to the first nucleotide sequence is an H5R promoter;
(ii) a nucleotide sequence comprising at least one promoter operably linked to the second nucleotide sequence, wherein the at least one promoter operably linked to the second nucleotide sequence is a late promoter that comprises the nucleotide sequence of SEQ ID NO: 561; and
(iii) a nucleotide sequence comprising at least one promoter operably linked to the third nucleotide sequence, wherein the at least one promoter operably linked to the third nucleotide sequence is a B8R promoter or a B19R promoter.

97. The nucleic acid of claim 96, wherein the at least one promoter operably linked to the third nucleotide sequence is a B8R promoter and a B19R promoter.

98. The nucleic acid of claim 97, wherein the B8R promoter comprises the nucleotide sequence of SEQ ID NO: 564 and the B19R promoter comprises the nucleotide sequence of SEQ ID NO: 565.

99. The nucleic acid of any one of claims 96-98, wherein the at least one promoter operatively linked to the first nucleotide sequence is an H5R early promoter or an H5R late promoter.

100. The nucleic acid of claim 99, wherein the at least one promoter operatively linked to the first nucleotide sequence is an H5R early promoter and an H5R late promoter.

101. The nucleic acid of claim 100, wherein the H5R early promoter comprises the nucleotide sequence of SEQ ID NO: 553 and the H5R late promoter comprises the nucleotide sequence of SEQ ID NO: 554.

102. A nucleic acid comprising a recombinant vaccinia virus genome, comprising:
(a) a vaccinia virus nucleotide sequence of SEQ ID NO: 210, which comprises partial C2L, F3L, B14R, and B29R vaccinia genes and which comprises a deletion in the B8R gene;
(b) a first transgene comprising a first nucleotide sequence encoding an antibody that specifically binds to CTLA-4, wherein the first nucleotide sequence is set forth in SEQ ID NO: 214, and wherein the first nucleotide sequence is in the same orientation as endogenous vaccinia virus genes that flank the first nucleotide sequence and the first transgene is present between the partial B14R and B29R vaccinia genes of the vaccinia virus nucleotide sequence of SEQ ID NO: 210;
(c) a second transgene comprising a second nucleotide sequence encoding an IL-12 polypeptide, wherein the second nucleotide sequence is set forth in SEQ ID NO: 215, and wherein the second nucleotide sequence is in the same orientation as endogenous vaccinia virus genes that flank the second nucleotide sequence and the second transgene is present in the locus of the deletion in the B8R gene of the vaccinia virus nucleotide sequence of SEQ ID NO: 210; and
(d) a third transgene comprising a third nucleotide sequence encoding FLT3L, wherein the third nucleotide sequence is set forth in SEQ ID NO: 216, wherein the third nucleotide sequence is in the same orientation as endogenous vaccinia virus genes that flank the third nucleotide sequence and the third transgene is present in the locus of the deletion in the B8R gene of the vaccinia virus nucleotide sequence of SEQ ID NO: 210, and wherein the third transgene is downstream of the second transgene;
wherein the nucleic acid further comprises:
(i) a nucleotide sequence comprising at least one promoter operably linked to the first nucleotide sequence, wherein the at least one promoter operably linked to the first nucleotide sequence is an H5R promoter;
(ii) a nucleotide sequence comprising at least one promoter operably linked to the second nucleotide sequence, wherein the at least one promoter operably linked to the second nucleotide sequence is a late promoter that comprises the nucleotide sequence of SEQ ID NO: 561; and
(iii) a nucleotide sequence comprising at least one promoter operably linked to the third nucleotide sequence, wherein the at least one promoter operably linked to the third nucleotide sequence is a B8R promoter or a B19R promoter.

103. The nucleic acid of claim 102, wherein the at least one promoter operably linked to the third nucleotide sequence is a B8R promoter and a B19R promoter.

104. The nucleic acid of claim 103, wherein the B8R promoter comprises the nucleotide sequence of SEQ ID NO: 564 and the B19R promoter comprises the nucleotide sequence of SEQ ID NO: 565.

105. The nucleic acid of any one of claims 102-104, wherein the at least one promoter operatively linked to the first nucleotide sequence is an H5R early promoter or an H5R late promoter.

106. The nucleic acid of claim 105, wherein the at least one promoter operatively linked to the first nucleotide sequence is an H5R early promoter and an H5R late promoter.

107. The nucleic acid of claim 106, wherein the H5R early promoter comprises the nucleotide sequence of SEQ ID NO: 553 and the H5R late promoter comprises the nucleotide sequence of SEQ ID NO: 554.

108. A nucleic acid comprising a recombinant vaccinia virus genome, comprising:
(a) a vaccinia virus nucleotide sequence of SEQ ID NO: 210, which comprises partial C2L, F3L, B14R, and B29R vaccinia genes and which comprises a deletion in the B8R gene;
(b) a first transgene comprising a first nucleotide sequence encoding an antibody that specifically binds to CTLA-4, wherein the first nucleotide sequence is set forth in SEQ ID NO: 214, and wherein the first nucleotide sequence is in the same orientation as endogenous vaccinia virus genes that flank the first nucleotide sequence and the first transgene is present between the partial C2L and F3L vaccinia genes of the vaccinia virus nucleotide sequence of SEQ ID NO: 210;
(c) a second transgene comprising a second nucleotide sequence encoding an IL-12 polypeptide, wherein the second nucleotide sequence is set forth in SEQ ID NO: 215, and wherein the second nucleotide sequence is in the same orientation as endogenous vaccinia virus genes that flank the second nucleotide sequence and the second transgene is present in the locus of the deletion in the B8R gene of the vaccinia virus nucleotide sequence of SEQ ID NO: 210; and
(d) a third transgene comprising a third nucleotide sequence encoding FLT3L, wherein the third nucleotide sequence is set forth in SEQ ID NO: 216, wherein the third nucleotide sequence is in the same orientation as endogenous vaccinia virus genes that flank the third nucleotide sequence and the third transgene is present in the locus of the deletion in the B8R gene of the vaccinia virus nucleotide sequence of SEQ ID NO: 210, and wherein the third transgene is upstream of the second transgene;
wherein the nucleic acid further comprises:
(i) a nucleotide sequence comprising at least one promoter operably linked to the first nucleotide sequence, wherein the at least one promoter operably linked to the first nucleotide sequence is a pS promoter;
(ii) a nucleotide sequence comprising at least one promoter operably linked to the second nucleotide sequence, wherein the at least one promoter operably linked to the second nucleotide sequence is a late promoter that comprises the nucleotide sequence of SEQ ID NO: 561; and
(iii) a nucleotide sequence comprising at least one promoter operably linked to the third nucleotide sequence, wherein the at least one promoter operably linked to the third nucleotide sequence is a B8R promoter or a B19R promoter.

109. The nucleic acid of claim 108, wherein the at least one promoter operably linked to the third nucleotide sequence is a B8R promoter and a B19R promoter.

110. The nucleic acid of claim 109, wherein the B8R promoter comprises the nucleotide sequence of SEQ ID NO: 564 and the B19R promoter comprises the nucleotide sequence of SEQ ID NO: 565.

111. The nucleic acid of any one of claims 108-110, wherein the nucleotide sequence of the pS comprises the nucleotide sequence of SEQ ID NO: 555, SEQ ID NO: 556, or SEQ ID NO: 557.

112. A nucleic acid comprising a recombinant vaccinia virus genome, comprising:
(a) a vaccinia virus nucleotide sequence of SEQ ID NO: 210, which comprises partial C2L, F3L, B14R, and B29R vaccinia genes and which comprises a deletion in the B8R gene;
(b) a first transgene comprising a first nucleotide sequence encoding an antibody that specifically binds to CTLA-4, wherein the first nucleotide sequence is set forth in SEQ ID NO: 214, and wherein the first nucleotide sequence is in the same orientation as endogenous vaccinia virus genes that flank the first nucleotide sequence and the first transgene is present between the partial C2L and F3L vaccinia genes of the vaccinia virus nucleotide sequence of SEQ ID NO: 210;
(c) a second transgene comprising a second nucleotide sequence encoding an IL-12 polypeptide, wherein the second nucleotide sequence is set forth in SEQ ID NO: 215, and wherein the second nucleotide sequence is in the same orientation as endogenous vaccinia virus genes that flank the second nucleotide sequence and the second transgene is present in the locus of the deletion in the B8R gene of the vaccinia virus nucleotide sequence of SEQ ID NO: 210; and
(d) a third transgene comprising a third nucleotide sequence encoding FLT3L, wherein the third nucleotide sequence is set forth in SEQ ID NO: 216, wherein the third nucleotide sequence is in the same orientation as endogenous vaccinia virus genes that flank the third nucleotide sequence and the third transgene is present in the locus of the deletion in the B8R gene of the vaccinia virus nucleotide sequence of SEQ ID NO: 210, and wherein the third transgene is downstream of the second transgene;
wherein the nucleic acid further comprises:
(i) a nucleotide sequence comprising at least one promoter operably linked to the first nucleotide sequence, wherein the at least one promoter operably linked to the first nucleotide sequence is a pS promoter;
(ii) a nucleotide sequence comprising at least one promoter operably linked to the second nucleotide sequence, wherein the at least one promoter operably linked to the second nucleotide sequence is a late promoter that comprises the nucleotide sequence of SEQ ID NO: 561; and
(iii) a nucleotide sequence comprising at least one promoter operably linked to the third nucleotide sequence, wherein the at least one promoter operably linked to the third nucleotide sequence is a B8R promoter or a B19R promoter.

113. The nucleic acid of claim 112, wherein the at least one promoter operably linked to the third nucleotide sequence is a B8R promoter and a B19R promoter.

114. The nucleic acid of claim 113, wherein the B8R promoter comprises the nucleotide sequence of SEQ ID NO: 564 and the B19R promoter comprises the nucleotide sequence of SEQ ID NO: 565.

115. The nucleic acid of any one of claims 112-114, wherein the nucleotide sequence of the pS comprises the nucleotide sequence of SEQ ID NO: 555, SEQ ID NO: 556, or SEQ ID NO: 557.

116. A nucleic acid comprising a recombinant vaccinia virus genome, comprising:
(a) a vaccinia virus nucleotide sequence of SEQ ID NO: 210, which comprises partial C2L, F3L, B14R, and B29R vaccinia genes and which comprises a deletion in the B8R gene;
(b) a first transgene comprising a first nucleotide sequence encoding an antibody that specifically binds to CTLA-4, wherein the first nucleotide sequence is set forth in SEQ ID NO: 214, and wherein the first nucleotide sequence is in the same orientation as endogenous vaccinia virus genes that flank the first nucleotide sequence and the first transgene is present between the partial B14R and B29R vaccinia genes of the vaccinia virus nucleotide sequence of SEQ ID NO: 210;
(c) a second transgene comprising a second nucleotide sequence encoding an IL-12 polypeptide, wherein the second nucleotide sequence is set forth in SEQ ID NO: 215, and wherein the second nucleotide sequence is in the same orientation as endogenous vaccinia virus genes that flank the second nucleotide sequence and the second transgene is present in the locus of the deletion in the B8R gene of the vaccinia virus nucleotide sequence of SEQ ID NO: 210; and
(d) a third transgene comprising a third nucleotide sequence encoding FLT3L, wherein the third nucleotide sequence is set forth in SEQ ID NO: 216, wherein the third nucleotide sequence is in the same orientation as endogenous vaccinia virus genes that flank the third nucleotide sequence and the third transgene is present in the locus of the deletion in the B8R gene of the vaccinia virus nucleotide sequence of SEQ ID NO: 210, and wherein the third transgene is upstream of the second transgene;
wherein the nucleic acid further comprises:
(i) a nucleotide sequence comprising at least one promoter operably linked to the first nucleotide sequence, wherein the at least one promoter operably linked to the first nucleotide sequence is a pS promoter;
(ii) a nucleotide sequence comprising at least one promoter operably linked to the second nucleotide sequence, wherein the at least one promoter operably linked to the second nucleotide sequence is a late promoter that comprises the nucleotide sequence of SEQ ID NO: 561; and
(iii) a nucleotide sequence comprising at least one promoter operably linked to the third nucleotide sequence, wherein the at least one promoter operably linked to the third nucleotide sequence is a B8R promoter or a B19R promoter.

117. The nucleic acid of claim 116, wherein the at least one promoter operably linked to the third nucleotide sequence is a B8R promoter and a B19R promoter.

118. The nucleic acid of claim 117, wherein the B8R promoter comprises the nucleotide sequence of SEQ ID NO: 564 and the B19R promoter comprises the nucleotide sequence of SEQ ID NO: 565.

119. The nucleic acid of any one of claims 116-118, wherein the nucleotide sequence of the pS comprises the nucleotide sequence of SEQ ID NO: 555, SEQ ID NO: 556, or SEQ ID NO: 557.

120. A nucleic acid comprising a recombinant vaccinia virus genome, comprising:
(a) a vaccinia virus nucleotide sequence of SEQ ID NO: 210, which comprises partial C2L, F3L, B14R, and B29R vaccinia genes and which comprises a deletion in the B8R gene;
(b) a first transgene comprising a first nucleotide sequence encoding an antibody that specifically binds to CTLA-4, wherein the first nucleotide sequence is set forth in SEQ ID NO: 214, and wherein the first nucleotide sequence is in the same orientation as endogenous vaccinia virus genes that flank the first nucleotide sequence and the first transgene is present between the partial B14R and B29R vaccinia genes of the vaccinia virus nucleotide sequence of SEQ ID NO: 210;
(c) a second transgene comprising a second nucleotide sequence encoding an IL-12 polypeptide, wherein the second nucleotide sequence is set forth in SEQ ID NO: 215, and wherein the second nucleotide sequence is in the same orientation as endogenous vaccinia virus genes that flank the second nucleotide sequence and the second transgene is present in the locus of the deletion in the B8R gene of the vaccinia virus nucleotide sequence of SEQ ID NO: 210; and
(d) a third transgene comprising a third nucleotide sequence encoding FLT3L, wherein the third nucleotide sequence is set forth in SEQ ID NO: 216, wherein the third nucleotide sequence is in the same orientation as endogenous vaccinia virus genes that flank the third nucleotide sequence and the third transgene is present in the locus of the deletion in the B8R gene of the vaccinia virus nucleotide sequence of SEQ ID NO: 210, and wherein the third transgene is downstream of the second transgene;
wherein the nucleic acid further comprises:
(i) a nucleotide sequence comprising at least one promoter operably linked to the first nucleotide sequence, wherein the at least one promoter operably linked to the first nucleotide sequence is a pS promoter;
(ii) a nucleotide sequence comprising at least one promoter operably linked to the second nucleotide sequence, wherein the at least one promoter operably linked to the second nucleotide sequence is a late promoter that comprises the nucleotide sequence of SEQ ID NO: 561; and
(iii) a nucleotide sequence comprising at least one promoter operably linked to the third nucleotide sequence, wherein the at least one promoter operably linked to the third nucleotide sequence is a B8R promoter or a B19R promoter.

121. The nucleic acid of claim 120, wherein the at least one promoter operably linked to the third nucleotide sequence is a B8R promoter and a B19R promoter.

122. The nucleic acid of claim 121, wherein the B8R promoter comprises the nucleotide sequence of SEQ ID NO: 564 and the B19R promoter comprises the nucleotide sequence of SEQ ID NO: 565.

123. The nucleic acid of any one of claims 120-122, wherein the nucleotide sequence of the pS comprises the nucleotide sequence of SEQ ID NO: 555, SEQ ID NO: 556, or SEQ ID NO: 557.

124. A nucleic acid comprising a recombinant vaccinia virus genome, comprising:
(a) a vaccinia virus nucleotide sequence of SEQ ID NO: 210, which comprises partial C2L, F3L, B14R, and B29R vaccinia genes and which comprises a deletion in the B8R gene;
(b) a first transgene comprising a first nucleotide sequence encoding an antibody that specifically binds to CTLA-4, wherein the first nucleotide sequence is set forth in SEQ ID NO: 214, and wherein the first nucleotide sequence is in the same orientation as endogenous vaccinia virus genes that flank the first nucleotide sequence and the first transgene is present between the partial C2L and F3L vaccinia genes of the vaccinia virus nucleotide sequence of SEQ ID NO: 210;
(c) a second transgene comprising a second nucleotide sequence encoding an IL-12 polypeptide, wherein the second nucleotide sequence is set forth in SEQ ID NO: 215, and wherein the second nucleotide sequence is in the same orientation as endogenous vaccinia virus genes that flank the second nucleotide sequence and the second transgene is present in the locus of the deletion in the B8R gene of the vaccinia virus nucleotide sequence of SEQ ID NO: 210; and
(d) a third transgene comprising a third nucleotide sequence encoding FLT3L, wherein the third nucleotide sequence is set forth in SEQ ID NO: 216, wherein the third nucleotide sequence is in the same orientation as endogenous vaccinia virus genes that flank the third nucleotide sequence and the third transgene is present in the locus of the deletion in the B8R gene of the vaccinia virus nucleotide sequence of SEQ ID NO: 210, and wherein the third transgene is upstream of the second transgene;
wherein the nucleic acid further comprises:
(i) a nucleotide sequence comprising at least one promoter operably linked to the first nucleotide sequence, wherein the at least one promoter operably linked to the first nucleotide sequence is an H5R promoter;
(ii) a nucleotide sequence comprising at least one promoter operably linked to the second nucleotide sequence, wherein the at least one promoter operably linked to the second nucleotide sequence is an F17R promoter; and
(iii) a nucleotide sequence comprising at least one promoter operably linked to the third nucleotide sequence, wherein the at least one promoter operably linked to the third nucleotide sequence is a B8R promoter or a B19R promoter.

125. The nucleic acid of claim 124, wherein the at least one promoter operably linked to the third nucleotide sequence is a B8R promoter and a B19R promoter.

126. The nucleic acid of claim 125, wherein the B8R promoter comprises the nucleotide sequence of SEQ ID NO: 564 and the B19R promoter comprises the nucleotide sequence of SEQ ID NO: 565.

127. The nucleic acid of any one of claims 124-126, wherein the at least one promoter operatively linked to the first nucleotide sequence is an H5R early promoter or an H5R late promoter.

128. The nucleic acid of claim 127, wherein the at least one promoter operatively linked to the first nucleotide sequence is an H5R early promoter and an H5R late promoter.

129. The nucleic acid of claim 128, wherein the H5R early promoter comprises the nucleotide sequence of SEQ ID NO: 553 and the H5R late promoter comprises the nucleotide sequence of SEQ ID NO: 554.

130. The nucleic acid of any one of claims 124-129, nucleotide sequence of the F17R promoter comprises the nucleotide sequence of SEQ ID NO: 563.

131. A nucleic acid comprising a recombinant vaccinia virus genome, comprising:
(a) a vaccinia virus nucleotide sequence of SEQ ID NO: 210, which comprises partial C2L, F3L, B14R, and B29R vaccinia genes and which comprises a deletion in the B8R gene;
(b) a first transgene comprising a first nucleotide sequence encoding an antibody that specifically binds to CTLA-4, wherein the first nucleotide sequence is set forth in SEQ ID NO: 214, and wherein the first nucleotide sequence is in the same orientation as endogenous vaccinia virus genes that flank the first nucleotide sequence and the first transgene is present between the partial C2L and F3L vaccinia genes of the vaccinia virus nucleotide sequence of SEQ ID NO: 210;
(c) a second transgene comprising a second nucleotide sequence encoding an IL-12 polypeptide, wherein the second nucleotide sequence is set forth in SEQ ID NO: 215, and wherein the second nucleotide sequence is in the same orientation as endogenous vaccinia virus genes that flank the second nucleotide sequence and the second transgene is present in the locus of the deletion in the B8R gene of the vaccinia virus nucleotide sequence of SEQ ID NO: 210; and
(d) a third transgene comprising a third nucleotide sequence encoding FLT3L, wherein the third nucleotide sequence is set forth in SEQ ID NO: 216, wherein the third nucleotide sequence is in the same orientation as endogenous vaccinia virus genes that flank the third nucleotide sequence and the third transgene is present in the locus of the deletion in the B8R gene, of the vaccinia virus nucleotide sequence of SEQ ID NO: 210 and wherein the third transgene is downstream of the second transgene;
wherein the nucleic acid further comprises:
(i) a nucleotide sequence comprising at least one promoter operably linked to the first nucleotide sequence, wherein the at least one promoter operably linked to the first nucleotide sequence is an H5R promoter;
(ii) a nucleotide sequence comprising at least one promoter operably linked to the second nucleotide sequence, wherein the at least one promoter operably linked to the second nucleotide sequence is an F17R promoter; and
(iii) a nucleotide sequence comprising at least one promoter operably linked to the third nucleotide sequence, wherein the at least one promoter operably linked to the third nucleotide sequence is a B8R promoter or a B19R promoter.

132. The nucleic acid of claim 131, wherein the at least one promoter operably linked to the third nucleotide sequence is a B8R promoter and a B19R promoter.

133. The nucleic acid of claim 132, wherein the B8R promoter comprises the nucleotide sequence of SEQ ID NO: 564 and the B19R promoter comprises the nucleotide sequence of SEQ ID NO: 565.

134. The nucleic acid of any one of claims 131-133, wherein the at least one promoter operatively linked to the first nucleotide sequence is an H5R early promoter or an H5R late promoter.

135. The nucleic acid of claim 134, wherein the at least one promoter operatively linked to the first nucleotide sequence is an H5R early promoter and an H5R late promoter.

136. The nucleic acid of claim 135, wherein the H5R early promoter comprises the nucleotide sequence of SEQ ID NO: 553 and the H5R late promoter comprises the nucleotide sequence of SEQ ID NO: 554.

137. The nucleic acid of any one of claims 131-136, nucleotide sequence of the F17R promoter comprises the nucleotide sequence of SEQ ID NO: 563.

138. A nucleic acid comprising a recombinant vaccinia virus genome, comprising:
(a) a vaccinia virus nucleotide sequence of SEQ ID NO: 210, which comprises partial C2L, F3L, B14R, and B29R vaccinia genes and which comprises a deletion in the B8R gene;
(b) a first transgene comprising a first nucleotide sequence encoding an antibody that specifically binds to CTLA-4, wherein the first nucleotide sequence is set forth in SEQ ID NO: 214, and wherein the first nucleotide sequence is in the same orientation as endogenous vaccinia virus genes that flank the first nucleotide sequence and the first transgene is present between the partial B14R and B29R vaccinia genes of the vaccinia virus nucleotide sequence of SEQ ID NO: 210;
(c) a second transgene comprising a second nucleotide sequence encoding an IL-12 polypeptide, wherein the second nucleotide sequence is set forth in SEQ ID NO: 215, and wherein the second nucleotide sequence is in the same orientation as endogenous vaccinia virus genes that flank the second nucleotide sequence and the second transgene is present in the locus of the deletion in the B8R gene of the vaccinia virus nucleotide sequence of SEQ ID NO: 210; and
(d) a third transgene comprising a third nucleotide sequence encoding FLT3L, wherein the third nucleotide sequence is set forth in SEQ ID NO: 216, wherein the third nucleotide sequence is in the same orientation as endogenous vaccinia virus genes that flank the third nucleotide sequence and the third transgene is present in the locus of the deletion in the B8R gene of the vaccinia virus nucleotide sequence of SEQ ID NO: 210, and wherein the third transgene is upstream of the second transgene;
wherein the nucleic acid further comprises:
(i) a nucleotide sequence comprising at least one promoter operably linked to the first nucleotide sequence, wherein the at least one promoter operably linked to the first nucleotide sequence is an H5R promoter;
(ii) a nucleotide sequence comprising at least one promoter operably linked to the second nucleotide sequence, wherein the at least one promoter operably linked to the second nucleotide sequence is an F17R promoter; and
(iii) a nucleotide sequence comprising at least one promoter operably linked to the third nucleotide sequence, wherein the at least one promoter operably linked to the third nucleotide sequence is a B8R promoter or a B19R promoter.

139. The nucleic acid of claim 138, wherein the at least one promoter operably linked to the third nucleotide sequence is a B8R promoter and a B19R promoter.

140. The nucleic acid of claim 139, wherein the B8R promoter comprises the nucleotide sequence of SEQ ID NO: 564 and the B19R promoter comprises the nucleotide sequence of SEQ ID NO: 565.

141. The nucleic acid of any one of claims 138-140, wherein the at least one promoter operatively linked to the first nucleotide sequence is an H5R early promoter or an H5R late promoter.

142. The nucleic acid of claim 141, wherein the at least one promoter operatively linked to the first nucleotide sequence is an H5R early promoter and an H5R late promoter.

143. The nucleic acid of claim 142, wherein the H5R early promoter comprises the nucleotide sequence of SEQ ID NO: 553 and the H5R late promoter comprises the nucleotide sequence of SEQ ID NO: 554.

144. The nucleic acid of any one of claims 138-143, nucleotide sequence of the F17R promoter comprises the nucleotide sequence of SEQ ID NO: 563.

145. A nucleic acid comprising a recombinant vaccinia virus genome, comprising:
(a) a vaccinia virus nucleotide sequence of SEQ ID NO: 210, which comprises partial C2L, F3L, B14R, and B29R vaccinia genes and which comprises a deletion in the B8R gene;
(b) a first transgene comprising a first nucleotide sequence encoding an antibody that specifically binds to CTLA-4, wherein the first nucleotide sequence is set forth in SEQ ID NO: 214, and wherein the first nucleotide sequence is in the same orientation as endogenous vaccinia virus genes that flank the first nucleotide sequence and the first transgene is present between the partial B14R and B29R vaccinia genes of the vaccinia virus nucleotide sequence of SEQ ID NO: 210;
(c) a second transgene comprising a second nucleotide sequence encoding an IL-12 polypeptide, wherein the second nucleotide sequence is set forth in SEQ ID NO: 215, and wherein the second nucleotide sequence is in the same orientation as endogenous vaccinia virus genes that flank the second nucleotide sequence and the second transgene is present in the locus of the deletion in the B8R gene of the vaccinia virus nucleotide sequence of SEQ ID NO: 210; and
(d) a third transgene comprising a third nucleotide sequence encoding FLT3L, wherein the third nucleotide sequence is set forth in SEQ ID NO: 216, wherein the third nucleotide sequence is in the same orientation as endogenous vaccinia virus genes that flank the third nucleotide sequence and the third transgene is present in the locus of the deletion in the B8R gene of the vaccinia virus nucleotide sequence of SEQ ID NO: 210, and wherein the third transgene is downstream of the second transgene;
wherein the nucleic acid further comprises:
(i) a nucleotide sequence comprising at least one promoter operably linked to the first nucleotide sequence, wherein the at least one promoter operably linked to the first nucleotide sequence is an H5R promoter;
(ii) a nucleotide sequence comprising at least one promoter operably linked to the second nucleotide sequence, wherein the at least one promoter operably linked to the second nucleotide sequence is an F17R promoter; and
(iii) a nucleotide sequence comprising at least one promoter operably linked to the third nucleotide sequence, wherein the at least one promoter operably linked to the third nucleotide sequence is a B8R promoter and a B19R promoter.

146. The nucleic acid of claim 145, wherein the at least one promoter operably linked to the third nucleotide sequence is a B8R promoter and a B19R promoter.

147. The nucleic acid of claim 146, wherein the B8R promoter comprises the nucleotide sequence of SEQ ID NO: 564 and the B19R promoter comprises the nucleotide sequence of SEQ ID NO: 565.

148. The nucleic acid of any one of claims 145-147, wherein the at least one promoter operatively linked to the first nucleotide sequence is an H5R early promoter or an H5R late promoter.

149. The nucleic acid of claim 148, wherein the at least one promoter operatively linked to the first nucleotide sequence is an H5R early promoter and an H5R late promoter.

150. The nucleic acid of claim 149, wherein the H5R early promoter comprises the nucleotide sequence of SEQ ID NO: 553 and the H5R late promoter comprises the nucleotide sequence of SEQ ID NO: 554.

151. The nucleic acid of any one of claims 145-150, nucleotide sequence of the F17R promoter comprises the nucleotide sequence of SEQ ID NO: 563.

152. A nucleic acid comprising a recombinant vaccinia virus genome, comprising:
(a) a vaccinia virus nucleotide sequence of SEQ ID NO: 210, which comprises partial C2L, F3L, B14R, and B29R vaccinia genes and which comprises a deletion in the B8R gene;
(b) a first transgene comprising a first nucleotide sequence encoding an antibody that specifically binds to CTLA-4, wherein the first nucleotide sequence is set forth in SEQ ID NO: 214, and wherein the first nucleotide sequence is in the same orientation as endogenous vaccinia virus genes that flank the first nucleotide sequence and the first transgene is present between the partial C2L and F3L vaccinia genes of the vaccinia virus nucleotide sequence of SEQ ID NO: 210;
(c) a second transgene comprising a second nucleotide sequence encoding an IL-12 polypeptide, wherein the second nucleotide sequence is set forth in SEQ ID NO: 215, and wherein the second nucleotide sequence is in the same orientation as endogenous vaccinia virus genes that flank the second nucleotide sequence and the second transgene is present in the locus of the deletion in the B8R gene of the vaccinia virus nucleotide sequence of SEQ ID NO: 210; and
(d) a third transgene comprising a third nucleotide sequence encoding FLT3L, wherein the third nucleotide sequence is set forth in SEQ ID NO: 216, wherein the third nucleotide sequence is in the same orientation as endogenous vaccinia virus genes that flank the third nucleotide sequence and the third transgene is present in the locus of the deletion in the B8R gene of the vaccinia virus nucleotide sequence of SEQ ID NO: 210, and wherein the third transgene is upstream of the second transgene;
wherein the nucleic acid further comprises:
(i) a nucleotide sequence comprising at least one promoter operably linked to the first nucleotide sequence, wherein the at least one promoter operably linked to the first nucleotide sequence is an H5R promoter;
(ii) a nucleotide sequence comprising at least one promoter operably linked to the second nucleotide sequence, wherein the at least one promoter operably linked to the second nucleotide sequence is a late promoter that comprises the nucleotide sequence of SEQ ID NO: 561; and
(iii) a nucleotide sequence comprising at least one promoter operably linked to the third nucleotide sequence, wherein the at least one promoter operably linked to the third nucleotide sequence is a E3L promoter.

153. The nucleic acid of claim 152, wherein the at least one promoter operatively linked to the first nucleotide sequence is an H5R early promoter or an H5R late promoter.

154. The nucleic acid of claim 153, wherein the at least one promoter operatively linked to the first nucleotide sequence is an H5R early promoter and an H5R late promoter.

155. The nucleic acid of claim 154, wherein the H5R early promoter comprises the nucleotide sequence of SEQ ID NO: 553 and the H5R late promoter comprises the nucleotide sequence of SEQ ID NO: 554.

156. The nucleic acid of any one of claims 152-155, nucleotide sequence of the E3L promoter comprises the nucleotide sequence of SEQ ID NO: 567.

157. A nucleic acid comprising a recombinant vaccinia virus genome, comprising:
(a) a vaccinia virus nucleotide sequence of SEQ ID NO: 210, which comprises partial C2L, F3L, B14R, and B29R vaccinia genes and which comprises a deletion in the B8R gene;
(b) a first transgene comprising a first nucleotide sequence encoding an antibody that specifically binds to CTLA-4, wherein the first nucleotide sequence is set forth in SEQ ID NO: 214, and wherein the first nucleotide sequence is in the same orientation as endogenous vaccinia virus genes that flank the first nucleotide sequence and the first transgene is present between the partial C2L and F3L vaccinia genes of the vaccinia virus nucleotide sequence of SEQ ID NO: 210;
(c) a second transgene comprising a second nucleotide sequence encoding an IL-12 polypeptide, wherein the second nucleotide sequence is set forth in SEQ ID NO: 215, and wherein the second nucleotide sequence is in the same orientation as endogenous vaccinia virus genes that flank the second nucleotide sequence and the second transgene is present in the locus of the deletion in the B8R gene of the vaccinia virus nucleotide sequence of SEQ ID NO: 210; and
(d) a third transgene comprising a third nucleotide sequence encoding FLT3L, wherein the third nucleotide sequence is set forth in SEQ ID NO: 216, wherein the third nucleotide sequence is in the same orientation as endogenous vaccinia virus genes that flank the third nucleotide sequence and the third transgene is present in the locus of the deletion in the B8R gene of the vaccinia virus nucleotide sequence of SEQ ID NO: 210, and wherein the third transgene is downstream of the second transgene;
wherein the nucleic acid further comprises:
(i) a nucleotide sequence comprising at least one promoter operably linked to the first nucleotide sequence, wherein the at least one promoter operably linked to the first nucleotide sequence is an H5R promoter;
(ii) a nucleotide sequence comprising at least one promoter operably linked to the second nucleotide sequence, wherein the at least one promoter operably linked to the second nucleotide sequence is a late promoter that comprises the nucleotide sequence of SEQ ID NO: 561; and
(iii) a nucleotide sequence comprising at least one promoter operably linked to the third nucleotide sequence, wherein the at least one promoter operably linked to the third nucleotide sequence is a E3L promoter.

158. The nucleic acid of claim 157, wherein the at least one promoter operatively linked to the first nucleotide sequence is an H5R early promoter or an H5R late promoter.

159. The nucleic acid of claim 158, wherein the at least one promoter operatively linked to the first nucleotide sequence is an H5R early promoter and an H5R late promoter.

160. The nucleic acid of claim 159, wherein the H5R early promoter comprises the nucleotide sequence of SEQ ID NO: 553 and the H5R late promoter comprises the nucleotide sequence of SEQ ID NO: 554.

161. The nucleic acid of any one of claims 157-160, nucleotide sequence of the E3L promoter comprises the nucleotide sequence of SEQ ID NO: 567.

162. A nucleic acid comprising a recombinant vaccinia virus genome, comprising:
(a) a vaccinia virus nucleotide sequence of SEQ ID NO: 210, which comprises partial C2L, F3L, B14R, and B29R vaccinia genes and which comprises a deletion in the B8R gene;
(b) a first transgene comprising a first nucleotide sequence encoding an antibody that specifically binds to CTLA-4, wherein the first nucleotide sequence is set forth in SEQ ID NO: 214, and wherein the first nucleotide sequence is in the same orientation as endogenous vaccinia virus genes that flank the first nucleotide sequence and the first transgene is present between the partial B14R and B29R vaccinia genes of the vaccinia virus nucleotide sequence of SEQ ID NO: 210;
(c) a second transgene comprising a second nucleotide sequence encoding an IL-12 polypeptide, wherein the second nucleotide sequence is set forth in SEQ ID NO: 215, and wherein the second nucleotide sequence is in the same orientation as endogenous vaccinia virus genes that flank the second nucleotide sequence and the second transgene is present in the locus of the deletion in the B8R gene of the vaccinia virus nucleotide sequence of SEQ ID NO: 210; and
(d) a third transgene comprising a third nucleotide sequence encoding FLT3L, wherein the third nucleotide sequence is set forth in SEQ ID NO: 216, wherein the third nucleotide sequence is in the same orientation as endogenous vaccinia virus genes that flank the third nucleotide sequence and the third transgene is present in the locus of the deletion in the B8R gene of the vaccinia virus nucleotide sequence of SEQ ID NO: 210, and wherein the third transgene is upstream of the second transgene;
wherein the nucleic acid further comprises:
(i) a nucleotide sequence comprising at least one promoter operably linked to the first nucleotide sequence, wherein the at least one promoter operably linked to the first nucleotide sequence is an H5R promoter;
(ii) a nucleotide sequence comprising at least one promoter operably linked to the second nucleotide sequence, wherein the at least one promoter operably linked to the second nucleotide sequence is a late promoter that comprises the nucleotide sequence of SEQ ID NO: 561; and
(iii) a nucleotide sequence comprising at least one promoter operably linked to the third nucleotide sequence, wherein the at least one promoter operably linked to the third nucleotide sequence is a E3L promoter.

163. The nucleic acid of claim 162, wherein the at least one promoter operatively linked to the first nucleotide sequence is an H5R early promoter or an H5R late promoter.

164. The nucleic acid of claim 163, wherein the at least one promoter operatively linked to the first nucleotide sequence is an H5R early promoter and an H5R late promoter.

165. The nucleic acid of claim 164, wherein the H5R early promoter comprises the nucleotide sequence of SEQ ID NO: 553 and the H5R late promoter comprises the nucleotide sequence of SEQ ID NO: 554.

166. The nucleic acid of any one of claims 162-165, nucleotide sequence of the E3L promoter comprises the nucleotide sequence of SEQ ID NO: 567.

167. A nucleic acid comprising a recombinant vaccinia virus genome, comprising:
(a) a vaccinia virus nucleotide sequence of SEQ ID NO: 210, which comprises partial C2L, F3L, B14R, and B29R vaccinia genes and which comprises a deletion in the B8R gene;
(b) a first transgene comprising a first nucleotide sequence encoding an antibody that specifically binds to CTLA-4, wherein the first nucleotide sequence is set forth in SEQ ID NO: 214, and wherein the first nucleotide sequence is in the same orientation as endogenous vaccinia virus genes that flank the first nucleotide sequence and the first transgene is present between the partial B14R and B29R vaccinia genes of the vaccinia virus nucleotide sequence of SEQ ID NO: 210;
(c) a second transgene comprising a second nucleotide sequence encoding an IL-12 polypeptide, wherein the second nucleotide sequence is set forth in SEQ ID NO: 215, and wherein the second nucleotide sequence is in the same orientation as endogenous vaccinia virus genes that flank the second nucleotide sequence and the second transgene is present in the locus of the deletion in the B8R gene of the vaccinia virus nucleotide sequence of SEQ ID NO: 210; and
(d) a third transgene comprising a third nucleotide sequence encoding FLT3L, wherein the third nucleotide sequence is set forth in SEQ ID NO: 216, wherein the third nucleotide sequence is in the same orientation as endogenous vaccinia virus genes that flank the third nucleotide sequence and the third transgene is present in the locus of the deletion in the B8R gene of the vaccinia virus nucleotide sequence of SEQ ID NO: 210, and wherein the third transgene is downstream of the second transgene;
wherein the nucleic acid further comprises:
(i) a nucleotide sequence comprising at least one promoter operably linked to the first nucleotide sequence, wherein the at least one promoter operably linked to the first nucleotide sequence is an H5R promoter;
(ii) a nucleotide sequence comprising at least one promoter operably linked to the second nucleotide sequence, wherein the at least one promoter operably linked to the second nucleotide sequence is a late promoter that comprises the nucleotide sequence of SEQ ID NO: 561; and
(iii) a nucleotide sequence comprising at least one promoter operably linked to the third nucleotide sequence, wherein the at least one promoter operably linked to the third nucleotide sequence is a E3L promoter.

168. The nucleic acid of claim 167, wherein the at least one promoter operatively linked to the first nucleotide sequence is an H5R early promoter or an H5R late promoter.

169. The nucleic acid of claim 168, wherein the at least one promoter operatively linked to the first nucleotide sequence is an H5R early promoter and an H5R late promoter.

170. The nucleic acid of claim 169, wherein the H5R early promoter comprises the nucleotide sequence of SEQ ID NO: 553 and the H5R late promoter comprises the nucleotide sequence of SEQ ID NO: 554.

171. The nucleic acid of any one of claims 167-170, nucleotide sequence of the E3L promoter comprises the nucleotide sequence of SEQ ID NO: 567.

172. A nucleic acid comprising a recombinant vaccinia virus genome, comprising:
(a) a vaccinia virus nucleotide sequence of SEQ ID NO: 210, which comprises partial C2L, F3L, B14R, and B29R vaccinia genes and which comprises a deletion in the B8R gene;
(b) a first transgene comprising a first nucleotide sequence encoding an antibody that specifically binds to CTLA-4, wherein the first nucleotide sequence is set forth in SEQ ID NO: 214, and wherein the first nucleotide sequence is in the same orientation as endogenous vaccinia virus genes that flank the first nucleotide sequence and the first transgene is present between the partial C2L and F3L vaccinia genes of the vaccinia virus nucleotide sequence of SEQ ID NO: 210;
(c) a second transgene comprising a second nucleotide sequence encoding an IL-12 polypeptide, wherein the second nucleotide sequence is set forth in SEQ ID NO: 215, and wherein the second nucleotide sequence is in the same orientation as endogenous vaccinia virus genes that flank the second nucleotide sequence and the second transgene is present in the locus of the deletion in the B8R gene of the vaccinia virus nucleotide sequence of SEQ ID NO: 210; and
(d) a third transgene comprising a third nucleotide sequence encoding FLT3L, wherein the third nucleotide sequence is set forth in SEQ ID NO: 216, wherein the third nucleotide sequence is in the same orientation as endogenous vaccinia virus genes that flank the third nucleotide sequence and the third transgene is present in the locus of the deletion in the B8R gene of the vaccinia virus nucleotide sequence of SEQ ID NO: 210, and wherein the third transgene is upstream of the second transgene;
wherein the nucleic acid further comprises:
(i) a nucleotide sequence comprising at least one promoter operably linked to the first nucleotide sequence, wherein the at least one promoter operably linked to the first nucleotide sequence is a pS promoter;
(ii) a nucleotide sequence comprising at least one promoter operably linked to the second nucleotide sequence, wherein the at least one promoter operably linked to the second nucleotide sequence an F17R promoter; and
(iii) a nucleotide sequence comprising at least one promoter operably linked to the third nucleotide sequence, wherein the at least one promoter operably linked to the third nucleotide sequence is a E3L promoter.

173. The nucleic acid of claim 172, wherein the nucleotide sequence of the pS promoter comprises the nucleotide sequence of SEQ ID NO: 555, SEQ ID NO: 556, or SEQ ID NO: 557.

174. The nucleic acid of claim 172 or 173, wherein the nucleotide sequence of the F17R promoter comprises the nucleotide sequence of SEQ ID NO: 563.

175. The nucleic acid of any one of claims 172-174, wherein the nucleotide sequence of the E3L promoter comprises the nucleotide sequence of SEQ ID NO:

567.

176. A nucleic acid comprising a recombinant vaccinia virus genome, comprising:
(a) a vaccinia virus nucleotide sequence of SEQ ID NO: 210, which comprises partial C2L, F3L, B14R, and B29R vaccinia genes and which comprises a deletion in the B8R gene;
(b) a first transgene comprising a first nucleotide sequence encoding an antibody that specifically binds to CTLA-4, wherein the first nucleotide sequence is set forth in SEQ ID NO: 214, and wherein the first nucleotide sequence is in the same orientation as endogenous vaccinia virus genes that flank the first nucleotide sequence and the first transgene is present between the partial C2L and F3L vaccinia genes of the vaccinia virus nucleotide sequence of SEQ ID NO: 210;
(c) a second transgene comprising a second nucleotide sequence encoding an IL-12 polypeptide, wherein the second nucleotide sequence is set forth in SEQ ID NO: 215, and wherein the second nucleotide sequence is in the same orientation as endogenous vaccinia virus genes that flank the second nucleotide sequence and the second transgene is present in the locus of the deletion in the B8R gene of the vaccinia virus nucleotide sequence of SEQ ID NO: 210; and
(d) a third transgene comprising a third nucleotide sequence encoding FLT3L, wherein the third nucleotide sequence is set forth in SEQ ID NO: 216, wherein the third nucleotide sequence is in the same orientation as endogenous vaccinia virus genes that flank the third nucleotide sequence and the third transgene is present in the locus of the deletion in the B8R gene of the vaccinia virus nucleotide sequence of SEQ ID NO: 210, and wherein the third transgene is downstream of the second transgene;
wherein the nucleic acid further comprises:
(i) a nucleotide sequence comprising at least one promoter operably linked to the first nucleotide sequence, wherein the at least one promoter operably linked to the first nucleotide sequence is a pS promoter;
(ii) a nucleotide sequence comprising at least one promoter operably linked to the second nucleotide sequence, wherein the at least one promoter operably linked to the second nucleotide sequence is an F17R promoter; and
(iii) a nucleotide sequence comprising at least one promoter operably linked to the third nucleotide sequence, wherein the at least one promoter operably linked to the third nucleotide sequence is a E3L promoter.

177. The nucleic acid of claim 176, wherein the nucleotide sequence of the pS promoter comprises the nucleotide sequence of SEQ ID NO: 555, SEQ ID NO: 556, or SEQ ID NO: 557.

178. The nucleic acid of claim 176 or 177, wherein the nucleotide sequence of the F17R promoter comprises the nucleotide sequence of SEQ ID NO: 563.

179. The nucleic acid of any one of claims 176-178, wherein the nucleotide sequence of the E3L promoter comprises the nucleotide sequence of SEQ ID NO:

567.

180. A nucleic acid comprising a recombinant vaccinia virus genome, comprising:
(a) a vaccinia virus nucleotide sequence of SEQ ID NO: 210, which comprises partial C2L, F3L, B14R, and B29R vaccinia genes and which comprises a deletion in the B8R gene;
(b) a first transgene comprising a first nucleotide sequence encoding an antibody that specifically binds to CTLA-4, wherein the first nucleotide sequence is set forth in SEQ ID NO: 214, and wherein the first nucleotide sequence is in the same orientation as endogenous vaccinia virus genes that flank the first nucleotide sequence and the first transgene is present between the partial B14R and B29R vaccinia genes of the vaccinia virus nucleotide sequence of SEQ ID NO: 210;
(c) a second transgene comprising a second nucleotide sequence encoding an IL-12 polypeptide, wherein the second nucleotide sequence is set forth in SEQ ID NO: 215, and wherein the second nucleotide sequence is in the same orientation as endogenous vaccinia virus genes that flank the second nucleotide sequence and the second transgene is present in the locus of the deletion in the B8R gene of the vaccinia virus nucleotide sequence of SEQ ID NO: 210; and
(d) a third transgene comprising a third nucleotide sequence encoding FLT3L, wherein the third nucleotide sequence is set forth in SEQ ID NO: 216, wherein the third nucleotide sequence is in the same orientation as endogenous vaccinia virus genes that flank the third nucleotide sequence and the third transgene is present in the locus of the deletion in the B8R gene of the vaccinia virus nucleotide sequence of SEQ ID NO: 210, and wherein the third transgene is upstream of the second transgene;
wherein the nucleic acid further comprises:
(i) a nucleotide sequence comprising at least one promoter operably linked to the first nucleotide sequence, wherein the at least one promoter operably linked to the first nucleotide sequence is a pS promoter;
(ii) a nucleotide sequence comprising at least one promoter operably linked to the second nucleotide sequence, wherein the at least one promoter operably linked to the second nucleotide sequence is an F17R promoter; and
(iii) a nucleotide sequence comprising at least one promoter operably linked to the third nucleotide sequence, wherein the at least one promoter operably linked to the third nucleotide sequence is a E3L promoter.

181. The nucleic acid of claim 180, wherein the nucleotide sequence of the pS promoter comprises the nucleotide sequence of SEQ ID NO: 555, SEQ ID NO: 556, or SEQ ID NO: 557.

182. The nucleic acid of claim 170 or 181, wherein the nucleotide sequence of the F17R promoter comprises the nucleotide sequence of SEQ ID NO: 563.

183. The nucleic acid of any one of claims 180-182, wherein the nucleotide sequence of the E3L promoter comprises the nucleotide sequence of SEQ ID NO:

567.

184. A nucleic acid comprising a recombinant vaccinia virus genome, comprising:
(a) a vaccinia virus nucleotide sequence of SEQ ID NO: 210, which comprises partial C2L, F3L, B14R, and B29R vaccinia genes and which comprises a deletion in the B8R gene;
(b) a first transgene comprising a first nucleotide sequence encoding an antibody that specifically binds to CTLA-4, wherein the first nucleotide sequence is set forth in SEQ ID NO: 214, and wherein the first nucleotide sequence is in the same orientation as endogenous vaccinia virus genes that flank the first nucleotide sequence and the first transgene is present between the partial B14R and B29R vaccinia genes of the vaccinia virus nucleotide sequence of SEQ ID NO: 210;
(c) a second transgene comprising a second nucleotide sequence encoding an IL-12 polypeptide, wherein the second nucleotide sequence is set forth in SEQ ID NO: 215, and wherein the second nucleotide sequence is in the same orientation as endogenous vaccinia virus genes that flank the second nucleotide sequence and the second transgene is present in the locus of the deletion in the B8R gene of the vaccinia virus nucleotide sequence of SEQ ID NO: 210; and
(d) a third transgene comprising a third nucleotide sequence encoding FLT3L, wherein the third nucleotide sequence is set forth in SEQ ID NO: 216, wherein the third nucleotide sequence is in the same orientation as endogenous vaccinia virus genes that flank the third nucleotide sequence and the third transgene is present in the locus of the deletion in the B8R gene of the vaccinia virus nucleotide sequence of SEQ ID NO: 210, and wherein the third transgene is downstream of the second transgene;
wherein the nucleic acid further comprises:
(i) a nucleotide sequence comprising at least one promoter operably linked to the first nucleotide sequence, wherein the at least one promoter operably linked to the first nucleotide sequence is a pS promoter;
(ii) a nucleotide sequence comprising at least one promoter operably linked to the second nucleotide sequence, wherein the at least one promoter operably linked to the second nucleotide sequence is an F17R promoter; and
(iii) a nucleotide sequence comprising at least one promoter operably linked to the third nucleotide sequence, wherein the at least one promoter operably linked to the third nucleotide sequence is a E3L promoter.

185. The nucleic acid of claim 184, wherein the nucleotide sequence of the pS promoter comprises the nucleotide sequence of SEQ ID NO: 555, SEQ ID NO: 556, or SEQ ID NO: 557.

186. The nucleic acid of claim 174 or 185, wherein the nucleotide sequence of the F17R promoter comprises the nucleotide sequence of SEQ ID NO: 563.

187. The nucleic acid of any one of claims 184-186, wherein the nucleotide sequence of the E3L promoter comprises the nucleotide sequence of SEQ ID NO:

567.

188. A virus comprising the nucleic acid comprising a recombinant vaccinia virus genome of any one of claims 1-187.

189. A packaging cell line comprising the nucleic acid of any one of claims 1-187.

190. A packaging cell line comprising the virus of claim 188.

191. A pharmaceutical composition comprising the virus of claim 188 and a physiologically acceptable carrier.

192. A kit comprising the nucleic acid of any one of claims 1-187 and a package insert instructing a user of the kit to express the nucleic acid in a host cell.

193. A kit comprising the virus of claim 188 and a package insert instructing a user of the kit to express the virus in a host cell.

194. A kit comprising the virus of claim 188 and a package insert instructing a user to administer a therapeutically effective amount of the virus to a mammalian patient having cancer, thereby treating the cancer.

195. The kit of claim 194, wherein the mammalian patient is a human patient.

196. A method of treating cancer in a mammalian patient, the method comprising administering to the mammalian patient a therapeutically effective amount of the virus of claim 188.

197. A method of treating cancer in a mammalian patient, the method comprising administering to the mammalian patient a therapeutically effective amount of the pharmaceutical composition of claim 191.

198. The method of claim 196 or 197, wherein the mammalian patient is a human patient.

199. The method of any one of claims 196-198, wherein the cancer is selected from the group consisting of leukemia, lymphoma, liver cancer, bone cancer, lung cancer, brain cancer, bladder cancer, gastrointestinal cancer, breast cancer, cardiac cancer, cervical cancer, uterine cancer, head and neck cancer, gallbladder cancer, laryngeal cancer, lip and oral cavity cancer, ocular cancer, melanoma, pancreatic cancer, prostate cancer, colorectal cancer, testicular cancer, and throat cancer.

200. The method of claim 199, wherein the method further comprises administering to the mammalian patient an anti-PD1 antibody or an anti-PD-L1 antibody.
